(19) United States
(12) Patent Application Publication
(10) Pub. No.: US 2009/0142322 A1
(43) Pub. Date: Jun. 4, 2009

(54) Coenzyme Q10 Production in a Recombinant Oleaginous Yeast

(75) Inventor: Rick W. Ye, Hockessin, DE (US)

Correspondence Address: E I DU PONT DE NEMOURS AND COMPANY;LEGAL PATENT RECORDS CENTER, BARLEY MILL PLAZA 25/1122B, 4417 LANCASTER PIKE, WILMINGTON, DE, 19805, US

(73) Assignee: E.I. DU PONT DE NEMOURS AND COMPANY, Wilmington, DE (US)

(21) Appl. No.: 12/277,856

(22) Filed: Nov. 25, 2008

Related U.S. Application Data
(60) Provisional application No. 60/991,266, filed on Nov. 30, 2007.

(51) Int. Cl. A61K 38/43; C12P 7/66; C12N 1/19; A61P 43/00

(52) U.S. Cl. 424/94.1; 435/133; 435/254.2

(57) ABSTRACT

Engineered strains of the oleaginous yeast Yarrowia lipolytica capable of co-producing coenzyme Q₁₀ and at least one ω-3/ω-6 polyunsaturated fatty acid are provided. The strains may also be engineered to co-produce at least one C₄₀ carotenoid. Methods of using the antioxidant products obtained (e.g., biomass and/or pigmented oils) in food and feed applications are also provided.

[0001] This application claims the benefit of U.S. Provisional Pat. App. No. 60/991,266, filed Nov. 30, 2007 and hereby incorporated herein by reference in its entirety.

### FIELD OF THE INVENTION

[0002] This invention is in the field of biotechnology. More specifically, this invention pertains to a process of producing the antioxidant coenzyme Q₁₀ and at least one ω-3/ω-6 polyunsaturated fatty acids in oleaginous yeast, yeast biomass produced by the process, and oils obtained from the yeast biomass.

### BACKGROUND OF THE INVENTION

[0003] Antioxidants can be described as compounds (e.g., enzymes, organic molecules) that slow the rate of oxidation reactions or that can counteract the damaging effects of oxygen. Although the term technically applies to molecules reacting with oxygen, it is often applied to molecules that protect from any free radical (i.e., a molecule with an unpaired electron, such as hydroxyl radicals, lipid oxyl or peroxyl radicals, singlet oxygen, and peroxinitrite formed from nitrogen oxide). Free radicals are natural by-products of cellular processes in an organism or are created by exposure to environmental factors. Within cellular organisms, free radicals can cause cellular and tissue damage, which can ultimately lead to disease. Antioxidants neutralize free radicals by donating one of their own electrons to the free radical, since the radicalized antioxidant molecule is more stable as a free-radical than the original free-radical.

[0004] A variety of nutrients or dietary components have antioxidant properties and thus can function to decrease the tissue content of reactive oxygen. Common antioxidants include vitamins C and E, β-carotene, proanthocyanidin, the minerals selenium and zinc, and coenzyme Q. Coenzyme Q, also known as ubiquinone and referred to herein as “CoQ”, refers to a series of related 2-3-dimethoxy-5-methyl-benzoquinones with a polyisoprenoid side chain in the 6-position that are widely distributed in animals, plants and microorganisms.

[0005] In structure, the CoQ group closely resembles the members of the vitamin K group and the tocopherylquinones (derived from tocopherols, e.g., vitamin E) in that they all possess: 1) a quinonoid ring derived from tyrosine or phenylalanine that functions as an electron-carrier; and, 2) a long hydrocarbon tail comprised of 5-carbon isoprene units. The quinones of the CoQ series, that is Q₆, Q₇, Q₈, Q₉ and Q₁₀, found in various biological species differ only slightly in chemical structure based on the length of the hydrocarbon tail, which ranges from 30 to 50 carbon atoms (corresponding to 6, 7, 8, 9 or 10 isoprenoid units in the side chain) and which facilitates CoQ's localization in mitochondrial or cytoplasmic membranes. Differences in properties are due to the differences in length of the side chain.

[0006] The antioxidant properties of CoQ₁₀ are directly related to the coenzyme's bioenergetic functions. Specifically, CoQ₁₀ is involved in the terminal electron transport system by transporting electrons from organic substrates to oxygen in the respiratory chain of mitochondria, which is essential in the production of biochemical energy (e.g., ATP) in all cells of aerobic organisms. As an energy carrier, CoQ₁₀ is continually going through an oxidation-reduction cycle. Specifically, CoQ₁₀ is reduced to a free radical semiquinone by the uptake of a single electron; reduction of this enzyme-bound intermediate by a second electron yields ubiquinol. As ubiquinol, the molecule holds electrons loosely and can easily donate one or two electrons to neutralize free radicals, which can be created in part by the energy-generating process.

[0007] The antioxidant properties of CoQ₁₀ are significant. In addition to quenching free radicals that threaten cellular components, such as nucleic acids and proteins in the mitochondria, ubiquinol also inhibits lipid peroxidation (i.e., degradation of lipids) in biological membranes and in low-density lipoprotein [“LDL”]. Furthermore, functionality of CoQ₁₀ may be enhanced in the presence of carotenoid compounds (see Int'l. App. Pub. No. WO 2005/097091 A1).

[0008] Based on the physiological role that CoQ₁₀ plays within living organisms, the coenzyme has become widely used as a nutritional supplement and as a pharmacological active agent. It has wide use and acceptance in the treatment of: mitochondrial disorders, cardiovascular disease processes, atherosclerosis, slow muscle degeneration (dystrophy or atrophy), neurodegenerative diseases (e.g., Parkinson's disease, Huntington's disease, Alzheimer's, amyotrophic lateral sclerosis [“ALS”]), periodontal disease, diabetes and CoQ₁₀ deficiency. CoQ₁₀ is also believed to strengthen the immune system, act as an anticancer agent and help counteract the aging processes.

[0009] CoQ₁₀ is currently available via chemical synthesis, semi-chemical synthesis and microbial conversion (Choi, Jin-Ho et al., Appl. Microbiol. Biotechnol., 68:9-15 (2005)). In the biotechnological arena, several strains of Agrobacterium tumefaciens, A. radiobacter, Rhodobacter sphaeroides and Paracoccus denitrificans have been identified that produce CoQ₁₀ in significant quantities (Yoshida et al., J. Gen. Appl. Microbiol., 44:19-26 (1998)), and marine bacteria of the genus Erythrobacter, Sphingomonas, Exiguobacterium, Lutibacterium and Bacillus have also been found to naturally produce CoQ₁₀ (Int'l. App. Pub. No. WO 2008023264). Genetic engineering of microbes, such as Escherichia coli, Rhodobacter sphaeroides, and plants such as brown rice for CoQ₁₀ biosynthesis has also been demonstrated with the expression of heterologous genes encoding decaprenyl diphosphate synthase (e.g., Zahiri et al., Metabol. Engineering, 8:406-416 (2006); JP 10057072; JP 2005211020; JP 2006 204215; Int'l. App. Pub. No. WO 00/047746; Int'l. App. Pub. No. WO 02/026933; U.S. Pat. No. 6,461,842; U.S. Pat. App. Pub. No. 2006/010519; Int'l. App. Pub. No. WO 07/120423). An oleaginous microbial host cell having the ability to co-produce CoQ₁₀ and at least 25% of its dry cell weight [“DCW”] as oil, wherein the CoQ₁₀ can advantageously help protect against autoxidation of the oil is expected to be advantageous. Both CoQ₁₀ and oil can be extracted with hexane or other solvents, thus reducing production cost. The offering of a final product containing both ingredients, that is, a stabilized microbial oil, may command a higher premium or competitive advantage.

[0010] An oleaginous microbial host cell that can co-produce CoQ₁₀ and polyunsaturated fatty acids [“PUFAs”] has not been reported. This deficiency exists despite previous descriptions of the utility of co-administration of CoQ₁₀ with PUFAs (see e.g., U.S. Pat. App. Pub. No. 2002/0198177 A1) and despite previous recognition that identification of such a microbe would be advantageous (e.g., see screening studies of various Thraustochytrids (marine fungoid protists) by Ocean Nutrition Canada, Ltd., as described in Burja et al., Appl. Microbiol. Biotechnol., 72:1161-1169 (2006) and Armenta et al., J. Agric, Food Chem., 54:9752-9758 (2006)). A means to recombinantly produce both CoQ₁₀ and PUFAs in a single microbial host cell would create a single product comprising both ingredients. This is particularly attractive when the recombinant cell biomass is used directly in the formulation, such as an animal feed.

[0011] Additionally, there are no reports of a microbial host cell that can co-produce CoQ₁₀, PUFAs and carotenoids, wherein said host cell comprises at least 25% of its DCW as oil, although it is recognized that the functionality of CoQ₁₀ may be enhanced in the presence of carotenoid compounds (see Int'l. App. Pub. No. WO 2005/097091 A1).

[0012] Carotenoids are themselves generally classified as antioxidants and may help to protect one another from oxidation during production and/or storage. As such, some carotenoids may alternatively be viewed as natural antioxidants in certain product applications where the carotenoid is not used as a pigment; for example, use of lycopene as an antioxidant in food products and/or animal feeds.

[0013] Many commercial products are formulated to contain a mixture of natural antioxidants, such as CoQ₁₀, and fats/lipids and/or pigments. For example, animal feeds, dietary supplements, and personal care products are formulated to contain antioxidants, PUFAs and carotenoids. Typically, for example, a commercial product formulator will obtain these compounds from a variety of sources and formulate them into a final product that contains an effective amount of each ingredient. The composition, purity and source of each ingredient may vary, resulting in a final product formulation that may require significant monitoring and/or processing to obtain the desired product specifications.

[0014] Engineering an oleaginous microorganism to simultaneously produce both CoQ₁₀ and at least one ω-3/ω-6 PUFA (and optionally at least one C₄₀ carotenoid) would create a higher value product or reduce production costs. Since carotenoids and PUFAs may undergo oxidation during storage, materials comprising these compounds are typically supplemented with one or more antioxidants. However, many of the synthetic antioxidants currently used in the market are undesirable due to their cost and/or possible safety concerns. If a microbial host produces both carotenoids and PUFAs in conjunction with a reduced form of CoQ₁₀, the CoQ₁₀ may aid in protecting compositions comprising carotenoids, PUFAs, and mixtures thereof from oxidation.

[0015] The problem to be solved therefore, is to provide a recombinant oleaginous yeast capable of producing the antioxidant CoQ₁₀ in combination with at least one ω-3/ω-6 PUFA (and optionally at least one C₄₀ carotenoid).

### SUMMARY OF THE INVENTION

[0016] The stated problem has been solved by providing a recombinant oleaginous yeast capable of producing the antioxidant, coenzyme Q₁₀, and polyunsaturated fatty acids.

[0017] Provided herein are methods of co-producing coenzyme Q₁₀ with polyunsaturated fatty acids (and optionally, C₄₀ carotenoids) from the same oleaginous yeast.

[0018] The importance of PUFAs is well understood. For example, certain PUFAs are important biological components of healthy cells and are recognized as: “essential” fatty acids that cannot be synthesized de novo in mammals and instead must be obtained either in the diet or derived by further desaturation and elongation of linoleic acid (LA; 18:2 ω-6) or α-linolenic acid (ALA; 18:3 ω-3); constituents of plasma membranes of cells, where they may be found in such forms as phospholipids or triacylglycerols; necessary for proper development (particularly in the developing infant brain) and for tissue formation and repair; and, precursors to several biologically active eicosanoids of importance in mammals (e.g., prostacyclins, eicosanoids, leukotrienes, prostaglandins). Additionally, a high intake of long-chain ω-3 PUFAs has cardiovascular protective effects (Dyerberg, J. et al., Amer. J. Clin. Nutr., 28:958-966 (1975); Dyerberg, J. et al., Lancet, 2(8081):117-119 (1978); Shimokawa, H., World Rev. Nutr. Diet, 88:100-108 (2001); von Schacky, C. and Dyerberg, J., World Rev. Nutr. Diet, 88:90-99 (2001)). Numerous other studies document wide-ranging health benefits conferred by administration of ω-3/ω-6 PUFAs against a variety of symptoms and diseases, such as asthma, psoriasis, eczema, diabetes, cancer.

[0019] Carotenoids are required elements of aquaculture. Salmon and shrimp aquaculture are particularly useful applications for this invention as carotenoid pigmentation is critically important for the value of these organisms (F. Shahidi, J. A. Brown, Carotenoid pigments in seafood and aquaculture: Critical reviews in food Science 38(1):1-67 (1998)). Additionally, carotenoids have utility as intermediates in the synthesis of steroids, flavors and fragrances and compounds with potential electro-optic applications.

[0020] Accordingly provided herein is a method for the production of CoQ₁₀ in a recombinant oleaginous yeast, comprising:
[0021] a) providing an oleaginous yeast, the oleaginous yeast
   [0022] 1.) producing a quinone of the coenzyme Q series selected from the group consisting of: CoQ₆, CoQ₇, CoQ₈ and CoQ₉,
   [0023] 2.) comprising genetic constructs encoding a functional ω-3/ω-6 polyunsaturated fatty acid biosynthetic pathway whereby the transformed yeast cells produce at least one polyunsaturated fatty acid; and,
   [0024] 3.) optionally comprising genetic constructs encoding a functional carotenoid biosynthetic pathway whereby the transformed yeast cells produce at least one carotenoid;
[0025] b) transforming the oleaginous yeast host cell with at least one copy of a genetic construct encoding decaprenyl diphosphate synthase; and,
[0026] c) culturing the transformed yeast cells of step (b) under suitable conditions, whereby the decaprenyl diphosphate synthase is expressed and whereby CoQ₁₀ is produced.

[0027] Also described herein is an oil comprising coenzyme Q₁₀ and at least one compound selected from the group consisting of: a ω-6 PUFA and a ω-3 PUFA.

[0028] A recombinant oleaginous yeast is provided comprising at least one copy of a genetic construct encoding decaprenyl diphosphate synthase.

[0029] Described herein is also a food or feed product comprising an effective amount of a microbial oil comprising coenzyme Q₁₀ and PUFAs (and optionally C₄₀ carotenoids).

### Biological Deposits

[0030] The following biological materials were made under the terms of the Budapest Treaty on the International Recognition of the Deposit of Microorganisms for the Purposes of Patent Procedure:

| Biological Material | Accession Number | Date of Deposit |
|---|---|---|
| Yarrowia lipolytica Y2047 | ATCC PTA-7186 | Oct. 26, 2005 |
| Yarrowia lipolytica Y2201 | ATCC PTA-7185 | Oct. 26, 2005 |
| Yarrowia lipolytica Y2096 | ATCC PTA-7184 | Oct. 26, 2005 |
| Yarrowia lipolytica Y3000 | ATCC PTA-7187 | Oct. 26, 2005 |
| Yarrowia lipolytica Y4128 | ATCC PTA-8614 | Aug. 23, 2007 |
| Yarrowia lipolytica Y4127 | ATCC PTA-8802 | Nov. 29, 2007 |

[0031] As used herein, “ATCC” refers to the American Type Culture Collection International Depository Authority located at ATCC, 10801 University Blvd., Manassas, Va. 20110-2209, U.S.A. The listed deposit will be maintained in the indicated international depository for at least 30 years and will be made available to the public upon the grant of a patent disclosing it. The availability of a deposit does not constitute a license to practice the subject invention in derogation of patent rights granted by government action.

### BRIEF DESCRIPTION OF THE FIGURES AND SEQUENCE DESCRIPTIONS

[0032] FIGS. 1A and 1B illustrate the CoQ biosynthetic pathway.

[0033] FIGS. 2A and 2B illustrates the ω-3/ω-6 fatty acid biosynthetic pathway.

[0034] FIGS. 3A and 3B illustrates the carotenoid biosynthetic pathway from farnesyl pyrophosphate to astaxanthin.

[0035] FIG. 4 provides plasmid maps for the following: (A) pZUF17; and, (B) pDMW359.

[0036] FIG. 5 diagrams the development of Yarrowia lipolytica strain Y4184U, producing EPA in the total lipid fraction.

[0037] The invention can be more fully understood from the following detailed description and the accompanying drawings and Sequence Listing, which form a part of this application.

[0038] The following sequences comply with 37 C.F.R. §1.821-1.825 (“Requirements for Patent Applications Containing Nucleotide Sequences and/or Amino Acid Sequence Disclosures—the Sequence Rules”) and are consistent with World Intellectual Property Organization (WIPO) Standard ST.25 (1998) and the sequence listing requirements of the EPO and PCT (Rules 5.2 and 49.5(a-bis), and Section 208 and Annex C of the Administrative Instructions). The symbols and format used for nucleotide and amino acid sequence data comply with the rules set forth in 37 C.F.R. §1.822.

[0039] SEQ ID NOs:1-42 are ORFs encoding genes or proteins (or portions thereof), or plasmids, as identified in Table 1.

TABLE 1
Summary Of Nucleic Acid And Protein SEQ ID Numbers

| | Nucleic | Protein |
|---|---|---|
| | acid | SEQ ID |
| Description and Abbreviation | SEQ ID NO. | NO. |
| Yarrowia lipolytica gene encoding a mutant | 1 | — |
| acetohydroxyacid synthase (AHAS) comprising a | (2987 bp) | |
| W497L mutation (CDS corresponds to bases 146-2556, | | |
| with a 461 bp intron between bases 268-732) | | |
| Euglena gracilis Δ9 elongase (“EgD9e”) | 3 | 4 |
| | (777 bp) | (258 AA) |
| Plasmid pZUF17 | 5 | — |
| | (8165 bp) | |
| Plasmid pDMW359 | 6 | — |
| | (7865 bp) | |
| Gluconobacter oxydans ddsA (GenBank ® Accession | — | 7 |
| No. BAA32241) | | (315 AA) |
| Sulfitobacter sp. ddsA (GenBank ® Accession No. | — | 8 |
| EAP81866) | | (332 AA) |
| Silicibacter pomeroyi ddsA (GenBank ® Accession No. | — | 9 |
| AAV93637) | | (332 AA) |
| Oceanicola batsensis ddsA (GenBank ® Accession | — | 10 |
| No. EAQ04419) | | (331 AA) |
| Rhizobium leguminosarum ddsA (GenBank ® | — | 11 |
| Accession No. CAK06434) | | (338 AA) |
| Mesorhizobium loti ddsA (GenBank ® Accession No. | — | 12 |
| BAB53531) | | (338 AA) |
| Agrobacterium tumefaciens str. C58 ddsA | — | 13 |
| (GenBank ® Accession No. AAL41650) | | (338 AA) |
| Roseovarius sp. ddsA (GenBank ® Accession No. | — | 14 |
| EAQ24568) | | (333 AA) |
| Rhodopseudomonas palustris ddsA (GenBank ® | — | 15 |
| Accession No. ABD89877) | | (336 AA) |
| Yarrowia lipolytica ppt1 (GenBank Accession No. | — | 16 |
| XP_505040) | | (397 AA) |
| Fusion of GenBank Accession No. XP_505040 (N- | 17 | 18 |
| terminus of Yarrowia lipolytica ppt1) and GenBank ® | (1168 bp) | (385 AA) |
| Accession No. BAA32241 (Gluconobacter oxydans | | |
| ddsA) | | |
| Plasmid pDMW359-Ss_ddsA | 19 | — |
| | (8231 bp) | |
| Fusion of GenBank Accession No. XP_505040 (N- | 20 | 21 |
| terminus of Yarrowia lipolytica ppt1) and GenBank ® | (1153 bp) | (380 AA) |
| Accession No. EAP81866 (Sulfitobacter sp. ddsA), | | |
| codon-optimized for expression in Y. lipolytica | | |
| Plasmid pDMW359-Sp_ddsA | 22 | — |
| | (8231 bp) | |
| Fusion of GenBank Accession No. XP_505040 (N- | 23 | 24 |
| terminus of Yarrowia lipolytica ppt1) and GenBank ® | (1153 bp) | (380 AA) |
| Accession No. AAV93637 (Silicibacter pomeroyi | | |
| ddsA), codon-optimized for expression in Y. lipolytica | | |
| Plasmid pDMW359-Ob_ddsA | 25 | — |
| | (8228 bp) | |
| Fusion of GenBank Accession No. XP_505040 (N- | 26 | 27 |
| terminus of Yarrowia lipolytica ppt1) and GenBank ® | (1150 bp) | (379 AA) |
| Accession No. EAQ04419 (Oceanicola batsensis | | |
| ddsA), codon-optimized for expression in Y. lipolytica | | |
| Plasmid pDMW359-RI_ddsA | 28 | — |
| | (8249 bp) | |
| Fusion of GenBank Accession No. XP_505040 (N- | 29 | 30 |
| terminus of Yarrowia lipolytica ppt1) and GenBank ® | (1171 bp) | (386 AA) |
| Accession No. CAK06434 (Rhizobium leguminosarum | | |
| ddsA), codon-optimized for expression in Y. lipolytica | | |
| Plasmid pDMW359-MI_ddsA | 31 | — |
| | (8249 bp) | |
| Fusion of GenBank Accession No. XP_505040 (N- | 32 | 33 |
| terminus of Yarrowia lipolytica ppt1) and GenBank ® | (1171 bp) | (386 AA) |
| Accession No. BAB53531 (Mesorhizobium loti ddsA), | | |
| codon-optimized for expression in Y. lipolytica | | |
| Plasmid pDMW359-At_ddsA | 34 | — |
| | (8248 bp) | |
| Fusion of GenBank Accession No. XP_505040 (N- | 35 | 36 |
| terminus of Yarrowia lipolytica ppt1) and GenBank ® | (1170 bp) | (386 AA) |
| Accession No. AAL41650 (Agrobacterium | | |
| tumefaciens str. C58 ddsA), codon-optimized for | | |
| expression in Y. lipolytica | | |
| Plasmid pDMW359-Rs_ddsA | 37 | — |
| | (8234 bp) | |
| Fusion of GenBank Accession No. XP_505040 (N- | 38 | 39 |
| terminus of Yarrowia lipolytica ppt1) and GenBank ® | (1156 bp) | (381 AA) |
| Accession No. EAQ24568 (Roseovarius sp. ddsA), | | |
| codon-optimized for expression in Y. lipolytica | | |
| Plasmid pDMW359-Rp_ddsA | 40 | — |
| | (8243 bp) | |
| Fusion of GenBank Accession No. XP_505040 (N- | 41 | 42 |
| terminus of Yarrowia lipolytica ppt1) and GenBank ® | (1165 bp) | (384 AA) |
| Accession No. ABD89877 (Rhodopseudomonas | | |
| palustris ddsA), codon-optimized for expression in Y. lipolytica | | |

### DETAILED DESCRIPTION OF THE INVENTION

[0040] Described herein is a recombinant oleaginous yeast production host for the production of coenzyme Q₁₀ [“CoQ₁₀”] and at least one polyunsaturated fatty acid, wherein said host comprises at least one copy of a ddsA gene encoding a decaprenyl diphosphate synthase, wherein expression of said decaprenyl diphosphate synthase enzyme results in the production of CoQ₁₀. The recombinant oleaginous yeast production host can optionally also produce at least one C₄₀ carotenoid.

[0041] In all of the above aspects, a recombinant oleaginous yeast is used as the production platform. In a preferred aspect, the oleaginous yeast host cell is Yarrowia lipolytica.

### Definitions

[0042] In this disclosure, a number of terms and abbreviations are used. The following definitions are provided.
[0043] “Coenzyme Q” is abbreviated “CoQ”.
[0044] “Open reading frame” is abbreviated “ORF”.
[0045] “Polymerase chain reaction” is abbreviated “PCR”.
[0046] “American Type Culture Collection” is abbreviated “ATCC”.
[0047] “Polyunsaturated fatty acid(s)” is abbreviated “PUFA(s)”.
[0048] “Triacylglycerols” are abbreviated “TAGs”.

[0049] The term “invention” or “present invention” as used herein is not meant to be limiting but applies generally to any of the inventions defined in the claims or described herein.

[0050] As used herein, the term “comprising” means the presence of the stated features, integers, steps, or components as referred to in the claims, but it does not preclude the presence or addition of one or more other features, integers, steps, components or groups thereof.

[0051] As used herein, the term “about” modifying the quantity of an ingredient or reactant of the invention employed refers to variation in the numerical quantity that can occur, for example, through: typical measuring and liquid handling procedures used for making concentrates or use solutions in the real world; inadvertent error in these procedures; differences in the manufacture, source, or purity of the ingredients employed to make the compositions or carry out the methods; and the like. The term “about” also encompasses amounts that differ due to different equilibrium conditions for a composition resulting from a particular initial mixture. Whether or not modified by the term “about”, the claims include equivalents to the quantities. In one aspect, the term “about” means within 20% of the recited numerical value, preferably within 10%, and most preferably within 5%.

[0052] As used herein, “coenzyme Q”, “CoQ” and “ubiquinone” will be used interchangeably and will refer to lipophillic redox-active molecules comprised of a redox-active quinone structure (CAS Registry No. 1339-63-5). In its reduced state, CoQ acts as an antioxidant; in its oxidized state, it can undergo a redox cycle in the presence of an electron donor and oxygen such that the electron donor is oxidized, the oxygen is reduced and the CoQ is available to undergo another redox cycle. The compound occurs in the majority of aerobic organisms, from bacteria to higher plants and animals.

[0053] The term coenzyme Q₁₀ [“CoQ₁₀”] refers to 2,3-dimethoxy-dimethyl-6-decaprenyl-1,4-benzoquinone, also known as ubiquinone-10 (CAS Registry No. 303-98-0). This coenzyme has a hydrocarbon tail that is 50 carbon atoms in length, comprised of ten 5-carbon isoprene units. Synthesis of CoQ₁₀ requires a prenyl diphosphate synthase, known as decaprenyl diphosphate [“DPP” or “DecPP”] synthase.

[0054] The terms, “prenyl diphosphate synthase”, “prenyl diphosphate synthetase” and “prenyltransferase” are used interchangeably herein. Each is a general term for those enzymes which catalyze a condensation reaction that polymerizes prenyl diphosphate (an allylic primer) and 3-isopentenyl diphosphate [“IPP”] to produce polyprenyl diphosphate. This class of genes is divided into 2 types, based on whether the condensation reaction of IPP is cis- [or (Z)-chain] elongation or trans- [or (E)-chain] elongation. Further, the maximum length of the isoprene chain which each prenyl diphosphate synthase can produce is fixed. Since the hydrophobic property of a product varies depending on the isoprene chain length of the product, there is great difference in the mode of requirement for the activity of enzymes. When bacterial enzymes are compared in terms of the mode of requirement, prenyl diphosphate synthases are classified into the following four groups: 1) Prenyl diphosphate synthase I comprising E type, short chain prenyl diphosphate synthases such as geranyl diphosphate synthase (“GPP”; catalyzing a C₅→C₁₀ reaction), farnesyl diphosphate synthase (“FPP”; catalyzing a C₅→C₁₅ reaction) and geranylgeranyl diphosphate synthase (“GGPP”; catalyzing a C₅→C₂₀ reaction); 2) Prenyl diphosphate synthase II comprising E type, medium chain prenyl diphosphate synthases such as hexaprenyl diphosphate synthase (“HexPP”; catalyzing a C₁₅→C₃₀ reaction) and heptaprenyl diphosphate synthase (“HepPP”; catalyzing a C₁₅→C₃₅ reaction); 3) Prenyl diphosphate synthase III comprising E type, long chain prenyl diphosphate synthases such as octaprenyl diphosphate synthase (“OctPP”; catalyzing a C₁₅→C₄₀ reaction), solanesyl [or nonaprenyl] diphosphate synthase (“SPP” or “NonPP”; catalyzing a C₁₅→C₄₅ reaction) and decaprenyl diphosphate synthase (“DecPP”; catalyzing a C₁₅→C₅₀ reaction); and 4) Prenyl diphosphate synthase IV comprising Z type, long chain prenyl diphosphate synthases such as Z-nonaprenyl diphosphate synthase (catalyzing a C₁₅→C₄₅ reaction), undecaprenyl diphosphate synthase (“UPP”; catalyzing a C₁₅→C₅₅ reaction) and dehydrodolichyl diphosphate synthase (“deDoIPP”; catalyzing a C₁₅→C₈₅₋₁₀₅ reaction) (reviewed in Szkopińska, A., Acta Biochimica Polonica, 47(2):469-480 (2000)). Of particular interest in the application herein are Group III long chain prenyl diphosphate synthases, particularly solanesyl and decaprenyl diphosphate synthases.

[0055] “Lipid bodies” refer to lipid droplets that are bound by a monolayer of phospholipid and, usually, by specific proteins. These organelles are sites where most organisms transport/store neutral lipids. Lipid bodies are thought to arise from microdomains of the endoplasmic reticulum that contain triacylglycerol [“TAG”] biosynthesis enzymes. Their synthesis and size appear to be controlled by specific protein components.

[0056] “Neutral lipids” refer to those lipids commonly found in cells in lipid bodies as storage fats and oils and are so called because at cellular pH, the lipids bear no charged groups. Generally, they are completely non-polar with no affinity for water. Neutral lipids generally refer to mono-, di-, and/or triesters of glycerol with fatty acids, also called monoacylglycerol, diacylglycerol or triacylglycerol, respectively, or collectively, acylglycerols. A hydrolysis reaction must occur to release free fatty acids from acylglycerols.

[0057] The terms “triacylglycerols” [“TAGs”] and “oil” are interchangeable and refer to neutral lipids composed of three fatty acyl residues esterified to a glycerol molecule. TAGs can contain long chain PUFAs, as well as shorter saturated and unsaturated fatty acids and longer chain saturated fatty acids. The TAG fraction of cells is also referred to as the “oil fraction”, and “oil biosynthesis” generically refers to the synthesis of TAGs in the cell. The oil or TAG fraction is a sub-fraction of the total lipid fraction, although also it constitutes a major part of the total lipid content, measured as the weight of total fatty acids in the cell as a percent of the DCW, in oleaginous organisms. The fatty acid composition in the oil [“TAG”] fraction and the fatty acid composition of the total lipid fraction are generally similar. Thus, an increase or decrease in the concentration of PUFAs in the total lipid fraction will correspond with an increase or decrease in the concentration of PUFAs in the oil [“TAG”] fraction, and vice versa.

[0058] As used herein, the term “biomass” refers specifically to recombinant yeast cellular material from the fermentation of an oleaginous yeast. The biomass may be in the form of whole cells, whole cell lysates, homogenized cells, partially hydrolyzed cellular material, and/or partially purified cellular material (e.g., microbially produced oil). Preferably, the fermentation utilizes a recombinant oleaginous yeast producing CoQ₁₀ and at least one PUFA (and optionally at least one one C₄₀ carotenoid).

[0059] The term “oleaginous” refers to those organisms that tend to store their energy source in the form of lipid (Weete, In: Fungal Lipid Biochemistry, 2^{nd} Ed., Plenum, 1980). Generally, the cellular oil content of these microorganisms follows a sigmoid curve, wherein the concentration of lipid increases until it reaches a maximum at the late logarithmic or early stationary growth phase and then gradually decreases during the late stationary and death phases (Yongmanitchai and Ward, Appl. Environ. Microbiol., 57:419-25 (1991)).

[0060] The term “oleaginous yeast” refers to those microorganisms classified as yeasts that can make oil, in excess of about 25% of their DCW as oil. Examples of oleaginous yeast include, but are no means limited to, the following genera: Yarrowia, Candida, Rhodotorula, Rhodosporidium, Cryptococcus, Trichosporon and Lipomyces.

[0061] The term “fermentable carbon source” means a carbon source that a microorganism will metabolize to derive energy. Typical carbon sources include, but are not limited to: monosaccharides, oligosaccharides, polysaccharides, alkanes, fatty acids, esters of fatty acids, monoglycerides, diglycerides, triglycerides, carbon dioxide, methanol, formaldehyde, formate and carbon-containing amines.

[0062] As used herein, an “isolated nucleic acid fragment” or “genetic construct” is a polymer of RNA or DNA that is single- or double-stranded, optionally containing synthetic, non-natural or altered nucleotide bases. An isolated nucleic acid fragment in the form of a polymer of DNA may be comprised of one or more segments of cDNA, genomic DNA or synthetic DNA.

[0063] The term “complementary” is used to describe the relationship between nucleotide bases that are capable of hybridizing to one another. For example, with respect to DNA, adenosine is complementary to thymine and cytosine is complementary to guanine.

[0064] “Codon degeneracy” refers to the nature in the genetic code permitting variation of the nucleotide sequence without effecting the amino acid sequence of an encoded polypeptide. The skilled artisan is well aware of the “codon-bias” exhibited by a specific host cell in usage of nucleotide codons to specify a given amino acid. Therefore, when synthesizing a gene for improved expression in a host cell, it is desirable to design the gene such that its frequency of codon usage approaches the frequency of preferred codon usage of the host cell.

[0065] “Synthetic genes” can be assembled from oligonucleotide building blocks that are chemically synthesized using procedures known to those skilled in the art. These building blocks are ligated and annealed to form gene segments that are then enzymatically assembled to construct the entire gene. Accordingly, the genes can be tailored for optimal gene expression based on optimization of nucleotide sequence to reflect the codon bias of the host cell. The skilled artisan appreciates the likelihood of successful gene expression if codon usage is biased towards those codons favored by the host. Determination of preferred codons can be based on a survey of genes derived from the host cell, where sequence information is available. For example, the codon usage profile for Yarrowia lipolytica is provided in U.S. Pat. No. 7,125,672.

[0066] “Gene” refers to a nucleic acid fragment that expresses a specific protein, and that may refer to the coding region alone or may include regulatory sequences preceding (5′ non-coding sequences) and following (3′ non-coding sequences) the coding sequence. “Native gene” refers to a gene as found in nature with its own regulatory sequences. “Chimeric gene” refers to any gene that is not a native gene, comprising regulatory and coding sequences that are not found together in nature. Accordingly, a chimeric gene may comprise regulatory sequences and coding sequences that are derived from different sources, or regulatory sequences and coding sequences derived from the same source, but arranged in a manner different than that found in nature. “Endogenous gene” refers to a native gene in its natural location in the genome of an organism. A “foreign” gene refers to a gene that is introduced into the host organism by gene transfer. Foreign genes can comprise native genes inserted into a non-native organism, native genes introduced into a new location within the native host, or chimeric genes. A “transgene” is a gene that has been introduced into the genome by a transformation procedure. A “codon-optimized gene” is a gene having its frequency of codon usage designed to mimic the frequency of preferred codon usage of the host cell.

[0067] “Coding sequence” refers to a DNA sequence that codes for a specific amino acid sequence. “Suitable regulatory sequences” refer to nucleotide sequences located upstream (5′ non-coding sequences), within, or downstream (3′ non-coding sequences) of a coding sequence, and which influence the transcription, RNA processing or stability, or translation of the associated coding sequence. Regulatory sequences may include promoters, translation leader sequences, introns, polyadenylation recognition sequences, RNA processing sites, effector binding sites and stem-loop structures.

[0068] “Promoter” refers to a DNA sequence capable of controlling the expression of a coding sequence or functional RNA. In general, a coding sequence is located 3′ to a promoter sequence. Promoters may be derived in their entirety from a native gene, or be composed of different elements derived from different promoters found in nature, or even comprise synthetic DNA segments. It is understood by those skilled in the art that different promoters may direct the expression of a gene in different tissues or cell types, or at different stages of development, or in response to different environmental or physiological conditions. Promoters that cause a gene to be expressed in most cell types at most times are commonly referred to as “constitutive promoters”. It is further recognized that since in most cases the exact boundaries of regulatory sequences have not been completely defined, DNA fragments of different lengths may have identical promoter activity.

[0069] The terms “3′ non-coding sequences” and “transcription terminator” refer to DNA sequences located downstream of a coding sequence. This includes polyadenylation recognition sequences and other sequences encoding regulatory signals capable of affecting mRNA processing or gene expression. The polyadenylation signal is usually characterized by affecting the addition of polyadenylic acid tracts to the 3′ end of the mRNA precursor. The 3′ region can influence the transcription, RNA processing or stability, or translation of the associated coding sequence.

[0070] “RNA transcript” refers to the product resulting from RNA polymerase-catalyzed transcription of a DNA sequence. When the RNA transcript is a perfect complementary copy of the DNA sequence, it is referred to as the primary transcript or it may be a RNA sequence derived from post-transcriptional processing of the primary transcript and is referred to as the mature RNA. “Messenger RNA” or “mRNA” refers to the RNA that is without introns and that can be translated into protein by the cell. “cDNA” refers to a double-stranded DNA that is complementary to, and derived from, mRNA. “Sense” RNA refers to RNA transcript that includes the mRNA and so can be translated into protein by the cell. “Antisense RNA” refers to a RNA transcript that is complementary to all or part of a target primary transcript or mRNA and that blocks the expression of a target gene (U.S. Pat. No. 5,107,065; Int'l. App. Pub. No. WO 99/28508). The complementarity of an antisense RNA may be with any part of the specific gene transcript, i.e., at the 5′ non-coding sequence, 3′ non-coding sequence, or the coding sequence. “Functional RNA” refers to antisense RNA, ribozyme RNA, or other RNA that is not translated and yet has an effect on cellular processes.

[0071] The term “operably linked” refers to the association of nucleic acid sequences on a single nucleic acid fragment so that the function of one is affected by the other. For example, a promoter is operably linked with a coding sequence when it is capable of affecting the expression of that coding sequence (i.e., the coding sequence is under the transcriptional control of the promoter). Coding sequences can be operably linked to regulatory sequences in sense or antisense orientation.

[0072] The term “expression”, as used herein, refers to the transcription and stable accumulation of sense (mRNA) or antisense RNA derived from nucleic acid fragments. Expression may also refer to translation of mRNA into a polypeptide.

[0073] “Mature” protein refers to a post-translationally processed polypeptide, i.e., one from which any pre- or propeptides present in the primary translation product have been removed. “Precursor” protein refers to the primary product of translation of mRNA, i.e., with pre- and propeptides still present. Pre- and propeptides may be (but are not limited to) intracellular localization signals.

[0074] The term “recombinase” refers to an enzyme(s) that carries out site-specific recombination to alter the DNA structure and includes transposases, lambda integration/excision enzymes, as well as site-specific recombinases.

[0075] “Recombinase site” or “site-specific recombinase sequence” means a DNA sequence that a recombinase will recognize and bind to. It will be appreciated that this may be a wild type or mutant recombinase site, as long as functionality is maintained and the recombinase enzyme may still recognize the site, bind to the DNA sequence, and catalyze recombination between two adjacent recombinase sites.

[0076] “Transformation” refers to the transfer of a nucleic acid molecule into a host organism, resulting in genetically stable inheritance. The nucleic acid molecule may be a plasmid that replicates autonomously, for example, or, it may integrate into the genome of the host organism. Host organisms containing the transformed nucleic acid fragments are referred to as “transgenic” or “recombinant” or “transformed” organisms.

[0077] The terms “plasmid” and “vector” refer to an extra chromosomal element often carrying genes that are not part of the central metabolism of the cell, and usually in the form of circular double-stranded DNA fragments. Such elements may be autonomously replicating sequences, genome integrating sequences, phage or nucleotide sequences, linear or circular, of a single- or double-stranded DNA or RNA, derived from any source, in which a number of nucleotide sequences have been joined or recombined into a unique construction which is capable of introducing an expression cassette(s) into a cell.

[0078] The term “expression cassette” refers to a fragment of DNA comprising the coding sequence of a selected gene and regulatory sequences preceding (5′ non-coding sequences) and following (3′ non-coding sequences) the coding sequence that are required for expression of the selected gene product. Thus, an expression cassette is typically composed of: 1) a promoter sequence; 2) a coding sequence (i.e., ORF); and, 3) a 3′ untranslated region (i.e., a terminator) that, in eukaryotes, usually contains a polyadenylation site. The expression cassette(s) is usually included within a vector, to facilitate cloning and transformation. Different expression cassettes can be transformed into different organisms including bacteria, yeast, plants and mammalian cells, as long as the correct regulatory sequences are used for each host.

[0079] The term “homologous recombination” refers to the exchange of DNA fragments between two DNA molecules (during cross over). The fragments that are exchanged are flanked by sites of identical nucleotide sequences between the two DNA molecules (i.e., “regions of homology”). The term “regions of homology” refer to stretches of nucleotide sequence on nucleic acid fragments that participate in homologous recombination that have homology to each other. Effective homologous recombination will generally take place where these regions of homology are at least about 10 bp in length, where at least about 50 bp in length is preferred. Typically fragments that are intended for recombination contain at least two regions of homology where targeted gene disruption or replacement is desired.

[0080] As used herein, the term “chromosomal integration” means that a chromosomal integration vector becomes congruent with the chromosome of a microorganism through recombination between homologous DNA regions on the chromosomal integration vector and within the chromosome. Many of the modifications to the oleaginous yeast Yarrowia lipolytica were introduced by chromosomal integration.

[0081] As used herein, the term “chromosomal integration vector” means an extra-chromosomal vector that is capable of integrating into the host's genome through homologous recombination.

[0082] A “substantial portion” of an amino acid or nucleotide sequence is that portion comprising enough of the amino acid sequence of a polypeptide or the nucleotide sequence of a gene to putatively identify that polypeptide or gene, either by manual evaluation of the sequence by one skilled in the art, or by computer-automated sequence comparison and identification using algorithms such as BLAST (Basic Local Alignment Search Tool; Altschul, S. F., et al., J. Mol. Biol., 215:403-410 (1993)). In general, a sequence of ten or more contiguous amino acids or thirty or more nucleotides is necessary in order to identify putatively a polypeptide or nucleic acid sequence as homologous to a known protein or gene. Moreover, with respect to nucleotide sequences, gene-specific oligonucleotide probes comprising 20-30 contiguous nucleotides may be used in sequence-dependent methods of gene identification (e.g., Southern hybridization) and isolation (e.g., in situ hybridization of bacterial colonies or bacteriophage plaques). In addition, short oligonucleotides of 12-15 bases may be used as amplification primers in PCR in order to obtain a particular nucleic acid fragment comprising the primers. Accordingly, a “substantial portion” of a nucleotide sequence comprises enough of the sequence to specifically identify and/or isolate a nucleic acid fragment comprising the sequence.

[0083] As used herein, “substantially similar” enzymes will refer to enzymes belonging to a family of proteins in the art known to share similar structures and function. It is well within the skill of one in the art to identify substantially similar proteins given a known structure. Typical methods to identify substantially similar structures will rely upon known sequence information (nucleotide sequence and/or amino acid sequences) and may include PCR amplification, nucleic acid hybridization, and/or sequence identity/similarity analysis (e.g., sequence alignments between partial and/or complete sequences and/or known functional motifs associated with the desired activity).

[0084] A nucleic acid molecule is “hybridizable” to another nucleic acid molecule, such as a cDNA, genomic DNA, or RNA molecule, when a single-stranded form of the nucleic acid molecule can anneal to the other nucleic acid molecule under the appropriate conditions of temperature and solution ionic strength. Given the nucleic acid sequences described herein, one of skill in the art can identify substantially similar nucleic acid fragments that may encode proteins having similar activity. Hybridization and washing conditions are well known and exemplified in Sambrook, J., Fritsch, E. F. and Maniatis, T. Molecular Cloning: A Laboratory Manual, 3^{rd} ed., Cold Spring Harbor Laboratory: Cold Spring Harbor, N.Y. (2001), particularly Chapter 11 and Table 11.1 therein. The conditions of temperature and ionic strength determine the “stringency” of the hybridization. Stringency conditions can be adjusted to screen for moderately similar fragments (such as homologous sequences from distantly related organisms), to highly similar fragments (such as genes that duplicate functional enzymes from closely related organisms). Post-hybridization washes determine stringency conditions. One set of preferred conditions uses a series of washes starting with 6×SSC, 0.5% SDS at room temperature for 15 min, then repeated with 2×SSC, 0.5% SDS at 45° C. for 30 min, and then repeated twice with 0.2×SSC, 0.5% SDS at 50° C. for 30 min. A more preferred set of stringent conditions uses higher temperatures in which the washes are identical to those above except for the temperature of the final two 30 min washes in 0.2×SSC, 0.5% SDS was increased to 60° C. Another preferred set of highly stringent conditions uses two final washes in 0.1×SSC, 0.1% SDS at 65° C. An additional set of stringent conditions include hybridization at 0.1×SSC, 0.1% SDS, 65° C. and washes with 2×SSC, 0.1% SDS at 65° C. followed by 0.1×SSC, 0.1% SDS at 65° C., for example.

[0085] In one aspect, suitable nucleic acid fragments encode polypeptides that are at least about 70% identical to the amino acid sequences reported herein. In another aspect, the nucleic acid fragments encode amino acid sequences that are about 85-90% identical to the amino acid sequences reported herein. In a further aspect, the nucleic acid fragments encode amino acid sequences that are at least about 90-100% identical to the amino acid sequences reported herein. Suitable nucleic acid fragments not only have the above homologies but typically encode a polypeptide having at least about 50 amino acids, preferably at least about 100 amino acids, more preferably at least about 150 amino acids, still more preferably at least about 200 amino acids, and most preferably at least about 250 amino acids.

[0086] The term “sequence analysis software” refers to any computer algorithm or software program that is useful for the analysis of nucleotide or amino acid sequences. “Sequence analysis software” may be commercially available or independently developed. Typical sequence analysis software will include, but is not limited to: 1) the GCG suite of programs (Wisconsin Package Version 9.0, Genetics Computer Group (GCG), Madison, Wis.); 2) BLASTP, BLASTN, BLASTX (Altschul et al., J Mol. Biol., 215:403-410 (1990)); 3) DNASTAR (DNASTAR, Inc. Madison, Wis.); 4) Sequencher (Gene Codes Corporation, Ann Arbor, Mich.); and, 5) the FASTA program incorporating the Smith-Waterman algorithm (W. R. Pearson, Comput. Methods Genome Res., [Proc. Int. Symp.] (1994), Meeting Date 1992, 111-20. Editor(s): Suhai, Sandor. Plenum: New York, N.Y.). Within the context of this application it will be understood that where sequence analysis software is used for analysis, that the results of the analysis will be based on the “default values” of the program referenced, unless otherwise specified. As used herein, “default values” will mean any set of values or parameters (as set by the software manufacturer) which originally load with the software when first initialized.

[0087] Standard recombinant DNA and molecular cloning techniques used herein are well known in the art and are described by Sambrook, J., Fritsch, E. F. and Maniatis, T., Molecular Cloning: A Laboratory Manual, 3^{rd} ed., Cold Spring Harbor Laboratory: Cold Spring Harbor, N.Y. (2001) (hereinafter “Maniatis”); by Silhavy, T. J., Bennan, M. L. and Enquist, L. W., Experiments with Gene Fusions, Cold Spring Harbor Laboratory: Cold Spring Harbor, N.Y. (1984); and by Ausubel, F. M. et al., Current Protocols in Molecular Biology, published by Greene Publishing Assoc. and Wiley-Interscience, Hoboken, N.J. (1987).

### Microbial Hosts for CoQ₁₀ and PUFA Production: Oleaginous Yeasts

[0088] Oleaginous organisms are those organisms that tend to store their energy source in the form of lipid (Weete, In: Fungal Lipid Biochemistry, 2^{nd} Ed., Plenum, 1980). Oleaginous yeast can accumulate in excess of about 25% of their DCW as oil, more preferably greater than about 30% of the cellular dry weight, and most preferably greater than about 40% of the cellular dry weight under oleaginous conditions. Examples of oleaginous yeast include, but are no means limited to, the following genera: Yarrowia, Candida, Rhodotorula, Rhodosporidium, Cryptococcus, Trichosporon and Lipomyces. More specifically, illustrative oil-synthesizing yeasts include: Rhodosporidium toruloides, Liopmyces starkeyii, L. lipoferus, Candida revkaufi, C. pulcherrima, C. tropicalis, C. utilis, Trichosporon pullans, T. cutaneum, Rhodotorula glutinus, R. graminis and Yarrowia lipolytica (formerly classified as Candida lipolytica). The technology for growing oleaginous yeast with high oil content is well developed (for example, see EP 0 005 277B1; Ratledge, C., Prog. Ind. Microbiol., 16:119-206 (1982)). These organisms have been commercially used for a variety of purposes in the past.

[0089] Of those organisms classified as oleaginous yeast, Yarrowia lipolytica was selected as a preferred microbial host for the purposes herein. This selection was based on: 1) confirmation that the organism naturally produces high levels (at least about 2000 ppm) of the natural antioxidant CoQ₉; and, 2) previous genetic engineering by the Applicants' Assignee resulting in significant production of various ω-3/ω-6 PUFAs and proof-of-concept production of various carotenoids (details infra). The Y. lipolytica strains designated as ATCC #20362, ATCC #8862, ATCC #18944, ATCC #76982 and/or LGAM S(7)1 (Papanikolaou S., and Aggelis G., Bioresour. Technol. 82(1):43-9 (2002)) are preferred wildtype hosts, due to preliminary studies targeted toward identification of wildtype strains having high lipid content (measured as a percent dry weight) and high volumetric productivity (measured as g/L h⁻¹).

### The CoQ Biosynthetic Pathway

[0090] A metabolic pathway, or biosynthetic pathway, in a biochemical sense, can be regarded as a series of chemical reactions occurring in order within a cell, catalyzed by enzymes, to achieve either the formation of a metabolic product to be used or stored by the cell, or the initiation of another metabolic pathway (then called a flux generating step). Many of these pathways are elaborate, and involve a step by step modification of the initial substance to shape it into a product having the exact chemical structure desired.

[0091] The biochemical reactions that lead to production of the quinones of the coenzyme Q series (i.e., Q₆, Q₇, Q₈, Q₉ and Q₁₀) are well-described in the minireview of R. Meganathan (FEMS Microbiol. Lett., 203:131-139 (2001)) for Escherichia coli and Saccharomyces cerevisiae and are summarized in FIGS. 1A and 1B herein. In brief, the quinonoid nucleus is derived from the shikimate pathway via chorismate or tyrosine. Formation of 4-hydroxybenzoate is the first committed step in the biosynthesis of CoQ. This molecule then undergoes prenylation, wherein the polyprenyl side chain of the final CoQ enzyme is added.

[0092] Prenylation: The polyprenyl side chain itself is formed via the mevalonate pathway, which results in the formation of the C₅ isoprene subunit, isopentenyl pyrophosphate [“IPP”] from the starting precursor, acetyl-CoA. More specifically, two molecules of acetyl-CoA are condensed by thiolase to yield acetoacetyl-CoA, which is subsequently converted to 3-hydroxy-3-methylglutaryl-CoA [“HMG-CoA”] by the action of 3-hydroxymethyl-3-glutaryl-CoA synthase [“HMG-CoA synthase”]. Next, 3-hydroxy-3-methylglutaryl-CoA reductase [“HMG-CoA reductase”), the rate controlling step in the mevalonate pathway, converts HMG-COA to mevalonate, to which two molecules of phosphate residues are then added by the action of two kinases (i.e., mevalonate kinase and phosphomevalonate kinase, respectively). Mevalonate pyrophosphate is then decarboxylated by the action of mevalonate pyrophosphate decarboxylase to yield IPP, which becomes the building unit for a wide variety of isoprene molecules necessary in living organisms.

[0093] IPP is isomerized to dimethylaryl pyrophosphate [“DMAPP”] by the action of isopentenyl pyrophosphate isomerase [“IPP isomerase”]. IPP and DMAPP are then converted to the C₁₀ unit geranyl pyrophosphate [“GPP”] by a head-to-tail condensation. In a similar condensation reaction between GPP and IPP, GPP is converted to the C₁₅ unit farnesyl pyrophosphate [“FPP”]. The biosynthesis of GPP and FPP from IPP and DMAPP is catalyzed by the enzyme FPP synthase. The product then reacts with a polyprenyl phosphate synthase, to produce the final polyprenyl side chain having from 30-50 carbon atoms, corresponding to 6, 7, 8, 9 or 10 isoprenoid units in the side chain. The precise length of the polyprenyl side chain present in a particular organism is constant and is determined by the nature of the polyprenyl phosphate synthase. For example, a hexaprenyl diphosphate synthase leads to synthesis of CoQ₆, while an octaprenyl diphosphate synthase leads to synthesis of CoQ₈, a solanesyl diphosphate synthase leads to synthesis of CoQ₉, and a decaprenyl diphosphate synthase leads to synthesis of CoQ₁₀. Studies summarized in Meganathan (supra) have demonstrated that mutant bacteria and yeast expressing a non-native polyprenyl phosphate synthase that results in a side chain of different length than in the parent do not affect the mutant strain.

[0094] Subsequent Ring Modifications: Prenylation results in the formation of 3-polyprenyl-4-hydroxybenzoate. This molecule then undergoes multiple ring modifications, including hydroxylation, methylation, decarboxylation, to result in formation of ubiquinol, which is non-enzymatically converted to ubiquinone [“CoQ”].

[0095] The genes required for CoQ biosynthesis in Yarrowia lipolytica have not been extensively characterized, since the wildtype oleaginous yeast contains all of the genes required for CoQ₉ production and thus only requires a single additional gene to enable biosynthesis of CoQ₁₀. However, based on the complete sequencing of the entire genome (Dujon, B. et al., Nature, 430 (6995):35-44 (2004)) and the public Y. lipolytica protein database of the “Yeast project Genolevures” (Center for Bioinformatics, LaBRI, Talence Cedex, France), one skilled in the art would readily be able to identify homologous genes corresponding to the ubiC, ubiA, ubiD, ubiX, ubiB, ubiG, ubiH, ubiE and ubiF genes of Escherichia coli and/or the coq2, coq3, coq6, coq5 and coq7 genes of Saccharomyces cerevisiae, which are known to catalyze the reactions diagrammed in FIGS. 1A and 1B. Similarly, the initial and intermediate genes of the mevalonate pathway responsible for the biosynthesis of the polyprenyl side chain of CoQ₉ should also easily be identified, up to and including FPP synthase. The last gene required for synthesis of the polyprenyl side chain of Yarrowia lipolytica's CoQ₉ is a solanesyl diphosphate synthase, which has not yet been identified or characterized.

[0096] One of skill in the art would recognize, for example, that any previously identified genes of the CoQ biosynthetic pathway, e.g., those from E. coli and/or S. cerevisiae, or portions thereof may be used to search for homologs in Yarrowia lipolytica using sequence analysis software. In general, such computer software matches similar sequences by assigning degrees of homology to various substitutions, deletions and other modifications. Alternatively, any of the previously identified sequences or portions thereof may also be employed as hybridization reagents for the identification of Y. lipolytica CoQ homologs. Hybridization methods are well defined and will not be reiterated herein. Alternately, isolation of homologous genes using sequence-dependent protocols is well known in the art. Examples of sequence-dependent protocols include, but are not limited to: 1) methods of nucleic acid hybridization; 2) methods of DNA and RNA amplification, as exemplified by various uses of nucleic acid amplification technologies [e.g., polymerase chain reaction [“PCR”], Mullis et al., U.S. Pat. No. 4,683,202; ligase chain reaction [“LCR”], Tabor, S. et al., Proc. Acad. Sci. U.S.A., 82:1074 (1985); or strand displacement amplification [“SDA”], Walker, et al., Proc. Natl. Acad. Sci. U.S.A., 89:392 (1992)]; and 3) methods of library construction and screening by complementation. This would enable direct isolation of any of the genes from Yarrowia lipolytica that are involved in the organism's native CoQ biosynthetic pathway, based on previously identified genes of the CoQ biosynthetic pathway from related organisms, such as those from E. coli and/or S. cerevisiae.

[0097] Genetic engineering of a strain of Yarrowia lipolytica that is capable of CoQ₁₀ production requires the expression of a heterologous decaprenyl diphosphate synthase, encoded by a ddsA gene. Although the decaprenyl diphosphate synthase of Gluconobacter oxydans is most well-characterized (Okada, K., et al., Eur. J. Biochem., 255(1):52-59 (1998); see also GenBank® Accession No. BAA32241), several ddsA genes have been identified from other organisms that have the putative ability to synthesize CoQ₁₀ based on homology searches. These genes have been identified in Sulfitobacter sp. NAS-14.1 (GenBank® Accession No. EAP81866), Silicibacter pomeroyi DSS-3 (GenBank® Accession No. AAV93637), Paracoccus denitrificans (U.S. Pat. No. 6,225,097), Paracoccus zeaxanthinifaciens (GenBank® Accession No. AJ431695), Rhodobacter capsulatus (GenBank® Accession No. DQ1 91802; U.S. Pat. No. 6,103,488), Oceanicola batsensis HTCC2597 (GenBank® Accession No. EAQ04419), Schizosaccharomyces pombe (Suzuki et al., J. Biochem., 121(3):496-505 (1997)), Agrobacterium tumerifaciens (GenBank® Accession No. DQ865262) and Sinorhizobium meliloti (GenBank® Accession No. DQ241792), for example. This, of course, is not intended to be limiting, as numerous other ddsA genes could be identified, isolated and expressed in an oleaginous yeast, such as Yarrowia lipolytica, according to the methods provided herein.

[0098] Amino acid sequence comparisons of various E-polyprenyl diphosphate synthases have revealed the presence of seven highly conserved regions, including 2 aspartate-rich domains (i.e., Domain II and Domain VI), which are thought to be the binding sites for the diphosphate moieties for IPP and allylic substrates (Koyama, T., J. Biochem (Tokyo), 113(3):355-363 (1993); Chen, A. et al., Protein Science, 3:600-607 (1994)). One skilled in the art would readily be able to use these conserved regions or portions thereof to search for homologs having decaprenyl diphosphate synthase activity in any organism having the ability to produce CoQ₁₀. As described previously, means for the identification of these homologs could include sequence analysis software, hybridization methods, nucleic acid amplification technologies and/or methods of library construction and screening by complementation.

[0099] Upon identification of an appropriate heterologous decaprenyl diphosphate synthase, construction of a suitable expression vector, and transformation into an oleaginous yeast, it is expected that the transformant host organism expressing the ddsA gene will produce CoQ₁₀. It is well known that CoQ compounds are insoluble in water and therefore, within the cell, they partition into the cell membrane, simplifying purification. As such, the CoQ₁₀ would be expected to remain in the hydrophobic/lipophillic portions of the biomass during processing (i.e., in the microbially produced oil).

### Production of PUFAs in Oleaginous Yeast

[0100] A variety of different hosts including plants, algae, fungi and yeast are being investigated as means for commercial PUFA production. Genetic engineering has demonstrated that the natural abilities of some hosts, even those natively limited to LA and ALA fatty acid production, can be substantially altered to result in high-level production of various long-chain 107 -3/ω-6 PUFAs (FIGS. 2A and 2B). Particularly relevant herein, the Applicants' Assignee has recently explored the utility of oleaginous yeast, and specifically, Yarrowia lipolytica (formerly classified as Candida lipolytica), as a preferred class of microorganisms for production of PUFAs. Despite a natural deficiency in the production of ω-6/ω-3 fatty acids in these organisms (since naturally produced PUFAs are limited to 18:2 fatty acids (and less commonly, 18:3 fatty acids)), high production of GLA, ARA, EPA and DHA relative to the total fatty acids in Y. lipolytica has been reported (U.S. patent application Ser. No. 11/198,975, Ser. No. 11/265,761, Ser. No. 11/264,784 and Ser. No. 11/264,737, corresponding to Int'l. App. Pub. No. WO 2006/033723, WO 2006/052870, WO 2006/055322 and WO 2006/052871).

[0101] Polyunsaturated Fatty Acid Definitions and Biosynthetic Pathway

[0102] The term “fatty acids” refers to long chain aliphatic acids (alkanoic acids) of varying chain lengths, from about C₁₂ to C₂₂ (although both longer and shorter chain-length acids are known). The predominant chain lengths are between C₁₆ and C₂₂. The structure of a fatty acid is represented by a simple notation system of “X:Y”, where X is the total number of carbon [“C”] atoms in the particular fatty acid and Y is the number of double bonds. Additional details concerning the differentiation between “saturated fatty acids” versus “unsaturated fatty acids”, “monounsaturated fatty acids” versus “polyunsaturated fatty acids” [“PUFAs”], and “omega-6 fatty acids” [“ω-6” or “n-6”] versus “omega-3 fatty acids” [“ω-3” or “n-3”] are provided in U.S. Pat. No. 7,238,482, which is hereby incorporated herein by reference.

[0103] Nomenclature used to describe PUFAs is shown below in Table 2. In the column titled “Shorthand Notation”, the omega-reference system is used to indicate the number of carbons, the number of double bonds and the position of the double bond closest to the omega carbon, counting from the omega carbon (which is numbered 1 for this purpose). The remainder of the Table summarizes the common names of ω-3 and ω-6 fatty acids and their precursors, the abbreviations that will be used throughout the specification and the chemical name of each compound.

TABLE 2
Nomenclature of Various PUFAs And Precursors

| | | | Shorthand |
|---|---|---|---|
| Common Name | Abbreviation | Chemical Name | Notation |
| Myristic | — | tetradecanoic | 14:0 |
| Palmitic | Palmitate | hexadecanoic | 16:0 |
| Palmitoleic | — | 9-hexadecenoic | 16:1 |
| Stearic | — | octadecanoic | 18:0 |
| Oleic | — | cis-9-octadecenoic | 18:1 |
| Linoleic | LA | cis-9,12-octadecadienoic | 18:2 □-6 |
| γ-Linolenic | GLA | cis-6,9,12- | 18:3 □-6 |
| | | octadecatrienoic | |
| Eicosadienoic | EDA | cis-11,14-eicosadienoic | 20:2 □-6 |
| Dihomo-γ | DGLA | cis-8,11,14- | 20:3-□6 |
| Linolenic | | eicosatrienoic | |
| Arachidonic | ARA | cis-5,8,11,14- | 20:4 \tilde{□}6 |
| | | eicosatetraenoic | |
| α-Linolenic | ALA | cis-9,12,15- | 18:3 □-3 |
| | | octadecatrienoic | |
| Stearidonic | STA | cis-6,9,12,15- | 18:4 □-3 |
| | | octadecatetraenoic | |
| Eicosatrienoic | ETrA | cis-11,14,17- | 20:3 □-3 |
| | | eicosatrienoic | |
| Eicosa- | ETA | cis-8,11,14,17- | 20:4 □-3 |
| tetraenoic | | eicosatetraenoic | |
| Eicosa- | EPA | cis-5,8,11,14,17- | 20:5 □-3 |
| pentaenoic | | eicosapentaenoic | |
| Docosatrienoic | DRA | cis-10,13,16- | 22:3 □-3 |
| | | docosatrienoic | |
| Docosa- | DTA | cis-7,10,13,16- | 22:4 □-6 |
| tetraenoic | | docosatetraenoic | |
| Docosa- | DPAn-6 | cis-4,7,10,13,16- | 22:5 □-6 |
| pentaenoic | | docosapentaenoic | |
| Docosa- | DPA | cis-7,10,13,16,19- | 22:5 □-3 |
| pentaenoic | | docosapentaenoic | |
| Docosa- | DHA | cis-4,7,10,13,16,19- | 22:6 □-3 |
| hexaenoic | | docosahexaenoic | |

[0104] The term “total fatty acids” [“TFAs”] herein refer to the sum of all cellular fatty acids that can be derivitized to fatty acid methyl esters [“FAMEs”] by the base transesterification method (as known in the art) in a given sample, which may be the total lipid fraction or the oil fraction, for example. Thus, total fatty acids include fatty acids from neutral and polar lipid fractions, including the phosphatidylcholine fraction, the phosphatidyletanolamine fraction and the diacylglycerol, monoacylglycerol and triacylglycerol [“TAG or oil”] fractions but not free fatty acids.

[0105] The term “total lipid content” of cells is a measure of TFAs as a percent of the dry cell weight [“DCW”]. Thus, total lipid content [“TFAs % DCW”] is equivalent to, e.g., milligrams of total fatty acids per 100 milligrams of DCW.

[0106] Generally, the concentration of a fatty acid is expressed herein as a weight percent of TFAs [“% TFAs”], e.g., milligrams of the given fatty acid per 100 milligrams of TFAs. Unless otherwise specifically stated in the disclosure herein, reference to the percent of a given fatty acid with respect to total lipids is equivalent to concentration of the fatty acid as % TFAs (e.g., % EPA of total lipids is equivalent to EPA % TFAs).

[0107] The terms “lipid profile” and “lipid composition” are interchangeable and refer to the amount of an individual fatty acid contained in a particular lipid fraction, such as in the total lipid fraction or the oil [“TAG”] fraction, wherein the amount is expressed as a percent of TFAs. The sum of each individual fatty acid present in the mixture should be 100.

[0108] The term “PUFA biosynthetic pathway” refers to a metabolic process that converts oleic acid to ω-6 fatty acids such as LA, EDA, GLA, DGLA, ARA, DRA, DTA and DPAn-6 and ω-3 fatty acids such as ALA, STA, ETrA, ETA, EPA, DPA and DHA. This process is well described in the literature. See e.g., Int'. App. Pub. No. WO 2006/052870. Briefly, this process involves elongation of the carbon chain through the addition of carbon atoms and desaturation of the molecule through the addition of double bonds, via a series of special elongation and desaturation enzymes, respectively, (i.e., “PUFA biosynthetic pathway enzymes”) present in the endoplasmic reticulim membrane. More specifically, “PUFA biosynthetic pathway enzyme” refers to any of the following enzymes (and genes which encode said enzymes) associated with the biosynthesis of a PUFA, including: a Δ9 elongase, a C_{14/16} elongase, a C_{16/18} elongase, a C_{18/20} elongase, a C_{20/22} elongase. a Δ4 desaturase, a Δ5 desaturase, a Δ6 desaturase, a Δ8 desaturase, Δ9 desaturase, a Δ12 desaturase, a Δ15 desaturase, and/or Δ17 desaturase.

[0109] The term “ω-3/ω-6 fatty acid biosynthetic pathway” refers to a set of genes which, when expressed under the appropriate conditions, encode enzymes that catalyze the production of either or both ω-3 and ω-6 fatty acids. Typically the genes involved in the ω-3/ω-6 fatty acid biosynthetic pathway encode PUFA biosynthetic pathway enzymes. A representative pathway is illustrated in FIGS. 2A and 2B, providing for the conversion of myristic acid through various intermediates to DHA, which demonstrates how both ω-3 and ω-6 fatty acids may be produced from a common source. The pathway is naturally divided into two portions, such that one portion generates only ω-3 fatty acids and the other portion, only ω-6 fatty acids. That portion that generates only ω-3 fatty acids is referred to herein as the ω-3 fatty acid biosynthetic pathway, whereas that portion that generates only ω-6 fatty acids is referred to herein as the ω-6 fatty acid biosynthetic pathway. However, as seen in FIGS. 2A and 2B and as described below, there are often multiple alternate pathways for production of a specific PUFA.

[0110] All pathways require the initial conversion of oleic acid to linoleic acid [“LA”], the first of the ω-6 fatty acids, by a Δ12 desaturase. Then, using the “Δ9 elongase/Δ8 desaturase pathway” and LA as substrate, long-chain ω-6 fatty acids are formed as follows: 1) LA is converted to eicosadienoic acid [“EDA”] by a Δ9 elongase; 2) EDA is converted to dihomo-γ-linolenic acid [“DGLA”] by a Δ8 desaturase; 3) DGLA is converted to arachidonic acid [“ARA”] by a Δ5 desaturase; 4) ARA is converted to docosatetraenoic acid [“DTA”] by a C_{20/22} elongase; and, 5) DTA is converted to docosapentaenoic acid [“DPAn-6”] by a Δ4 desaturase. Alternatively, the “Δ9 elongase/Δ8 desaturase pathway” can use α-linolenic acid [“ALA”] as substrate to produce long-chain ω-3 fatty acids as follows: 1) LA is converted to ALA, the first of the ω-3 fatty acids, by a Δ15 desaturase; 2) ALA is converted to eicosatrienoic acid [“ETrA”] by a Δ9 elongase; 3) ETrA is converted to eicosatetraenoic acid [“ETA”] by a Δ8 desaturase; 4) ETA is converted to eicosapentaenoic acid [“EPA”] by a Δ5 desaturase; 5) EPA is converted to docosapentaenoic acid [“DPA”] by a C_{20/22} elongase; and, 6) DPA is converted to docosahexaenoic acid [“DHA”] by a Δ4 desaturase. Optionally, ω-6 fatty acids may be converted to ω-3 fatty acids; for example, ETA and EPA are produced from DGLA and ARA, respectively, by Δ17 desaturase activity.

[0111] Alternate pathways for the biosynthesis of ω-3/ω-6 fatty acids utilize a Δ6 desaturase and C_{18/20} elongase (i.e., the “Δ6 desaturase/Δ6 elongase pathway”). More specifically, LA and ALA may be converted to γ-linolenic acid [“GLA”] and stearidonic acid [“STA”], respectively, by a Δ6 desaturase; then, a C_{18/20} elongase converts GLA to DGLA and/or STA to ETA. Downstream PUFAs are subsequently formed as described above.

[0112] As used herein, the term “functional” as used herein relating to the (ω-3/ω-6 fatty acid biosynthetic pathway, means that some (or all) of the genes in the pathway express active enzymes, resulting in in vivo catalysis or substrate conversion. It should be understood that “ω-3/ω-6 fatty acid biosynthetic pathway” or “functional ω-3/ω-6 fatty acid biosynthetic pathway” does not imply that all the genes listed in the above paragraph are required, as a number of fatty acid products will only require the expression of a subset of the genes of this pathway.

[0113] As used herein, the term “desaturase” refers to a polypeptide that can desaturate adjoining carbons in a fatty acid by removing a hydrogen from one of the adjoining carbons and thereby introducing a double bond between them. Desaturation produces a fatty acid or precursor of interest. Despite use of the omega-reference system throughout the specification to refer to specific fatty acids, it is more convenient to indicate the activity of a desaturase by counting from the carboxyl end of the substrate using the delta-system. Of particular interest herein are: 1) Δ5 desaturases that catalyze the conversion of the substrate fatty acid, DGLA, to ARA and/or of the substrate fatty acid, ETA, to EPA; 2) Δ17 desaturases that desaturate a fatty acid between the 17^{th} and 18^{th} carbon atom numbered from the carboxyl-terminal end of the molecule and which, for example, catalyze the conversion of the substrate fatty acid, ARA, to EPA and/or the conversion of the substrate fatty acid, DGLA, to ETA; 3) Δ6 desaturases that catalyze the conversion of the substrate fatty acid, LA, to GLA and/or the conversion of the substrate fatty acid, ALA, to STA; 4) Δ12 desaturases that catalyze the conversion of the substrate fatty acid, oleic acid, to LA; 5) Δ15 desaturases that catalyze the conversion of the substrate fatty acid, LA, to ALA and/or the conversion of the substrate fatty acid, GLA, to STA; 6) Δ4 desaturases that catalyze the conversion of the substrate fatty acid, DPA, to DHA and/or the conversion of the substrate fatty acid, DTA, to DPAn-6; 7) Δ8 desaturases that catalyze the conversion of the substrate fatty acid, EDA, to DGLA and/or the conversion of the substrate fatty acid, ETrA, to ETA; and, 8) Δ9 desaturases that catalyze the conversion of the substrate fatty acid, palmitate, to palmitoleic acid (16:1) and/or the conversion of the substrate fatty acid, stearic acid, to oleic acid. Δ15 and Δ17 desaturases are also occasionally referred to as “omega-3 desaturases”, “ω-3 desaturases”, and/or “Δ-3 desaturases”, based on their ability to convert ω-6 fatty acids into their ω-3 counterparts (e.g., conversion of LA into ALA and ARA into EPA, respectively). It may be desirable to desirable to empirically determine the specificity of a particular fatty acid desaturase by transforming a suitable host with the gene for the fatty acid desaturase and determining its effect on the fatty acid profile of the host.

[0114] As used herein, the term “elongase” refers to a polypeptide that can elongate a fatty acid carbon chain to produce an acid 2 carbons longer than the fatty acid substrate that the elongase acts upon. This process of elongation occurs in a multi-step mechanism in association with fatty acid synthase, as described in U.S. Pat. App. Pub. No. 2005/0132442 and Int'l App. Pub. No. WO 2005/047480. Examples of reactions catalyzed by elongase systems are the conversion of GLA to DGLA, STA to ETA and EPA to DPA. In general, the substrate selectivity of elongases is somewhat broad but segregated by both chain length and the degree and type of unsaturation. For example, a C_{14/16} elongase will utilize a C₁₄ substrate (e.g., myristic acid), a C_{16/18} elongase will utilize a C₁₆ substrate (e.g., palmitate), a C_{18/20} elongase will utilize a C₁₈ substrate (e.g., GLA, STA) and a C_{20/22} elongase will utilize a C₂₀ substrate (e.g., EPA). In like manner, a Δ9 elongase is able to catalyze the conversion of LA and ALA to EDA and ETrA, respectively. It is important to note that some elongases have broad specificity and thus a single enzyme may be capable of catalyzing several elongase reactions. For example, a single enzyme may thus act as both a C_{16/18} elongase and a C_{18/20} elongase.

[0115] Genetically Engineered Oleaginous Yeast for PUFA Production

[0116] As described above, oleaginous yeast can be engineered to produce ω-3/ω-6 PUFAs by integration of appropriate heterologous genes encoding desaturases and elongases of the Δ6 desaturase/Δ6 elongase pathway or the Δ9 elongase/Δ8 desaturase pathway into the host organism for production of any particular PUFA of interest. Preferred genes and considerations for choosing a specific polypeptide having desaturase or elongase activity are detailed in U.S. patent application Ser. No. 11/198,975, Ser. No. 11/265,761, Ser. No. 11/264,784, Ser. No. 11/264,737 and Ser. No. 12/244,822, as are details concerning additional modifications that may be required to enable high level production of a particular PUFA, including: 1) manipulation of the activity of acyltransferases that allow for the transfer of omega fatty acids into storage lipid pools (i.e., the TAG fraction); 2) over-expression of desaturases, elongases, diacylglycerol cholinephosphotransferases and acyltransferases by use of strong promoters, expression in multicopy, and/or codon-optimization; 3) down-regulation of the expression of specific genes within the PUFA biosynthetic pathway that diminish overall accumulation of the desired PUFA; and, 4) manipulation of pathways and global regulators that affect production of the desired PUFA. The term “high-level production” refers to production of at least about 5% of the desired PUFA (i.e., LA, ALA, EDA, GLA, STA, ETrA, DGLA, ETA, ARA, EPA, DTA, DPAn-6, DPA and/or DHA) in the total lipids of the microbial host, preferably at least about 10% of the desired PUFA in the total lipids, more preferably at least about 15-25% of the desired PUFA in the total lipids, more preferably at least about 25-35% of the desired PUFA in the total lipids, and most preferably at least about 35-45% of the desired PUFA in the total lipids. The structural form of the PUFA is not limiting; thus, for example, the EPA may exist in the total lipids as free fatty acids or in esterified forms such as acylglycerols, phospholipids, sulfolipids or glycolipids

[0117] Although numerous oleaginous yeast could be engineered for production of preferred ω-3/ω-6 PUFAs based on the teachings herein and in co-pending and commonly owned U.S. patent application Ser. No. 11/198,975 [Int'l. App. Pub. No. WO 2006/033723], Ser. No. 11/265,761 [Int'l. App. Pub. No. WO 2006/052870], Ser. No. 11/264,784 [Int'l. App. Pub. No. WO 2006/055322], Ser. No. 11/264,737 [Int'l. App. Pub. No. WO 2006/052871] and Ser. No. 12/244,822 (filed Oct. 03, 2008), representative strains of the oleaginous yeast Yarrowia lipolytica are described in Table 11 of Example 5. These include the following strains that have been deposited with the American Type Culture Collection (ATCC): Y. lipolytica strain Y2047 (producing ARA via the Δ6 desaturase/Δ6 elongase pathway; ATCC Accession No. PTA-7186); Y. lipolytica strain Y2096 (producing EPA via the Δ6 desaturase/Δ6 elongase pathway; ATCC Accession No. PTA-7184); Y. lipolytica strain Y2201 (producing EPA via the Δ9 elongase/Δ8 desaturase pathway; ATCC Accession No. PTA-7185); and Y. lipolytica strain Y3000 (producing DHA via the Δ6 desaturase/Δ6 elongase pathway; ATCC Accession No. PTA-7187); Y. lipolytica strain Y4128 (producing EPA via the Δ9 elongase/Δ8 desaturase pathway; ATCC Accession No. PTA-8614); and Y. lipolytica strain Y4127 (producing EPA via the Δ9 elongase/Δ8 desaturase pathway; ATCC Accession No. PTA-8802).

### Oleaginous Yeast for PUFA Production and CoQ₁₀ Production

[0118] In living organisms, lipids serve as structural components of cell membranes, are important hormones or contain essential fatty acids, and are used for energy storage. TAGs are the primary storage unit for fatty acids; and, a wide spectrum of fatty acids can be incorporated into TAGs, including saturated and unsaturated fatty acids and short-chain and long-chain fatty acids. Some non-limiting examples of fatty acids that can be incorporated into TAGs by acyltransferases include: capric (10:0), lauric (12:0), myristic (14:0), palmitic (16:0), palmitoleic (16:1), stearic (18:0), oleic (18:1), vaccenic (18:1), LA, eleostearic (18:3), ALA, GLA, arachidic (20:0), EDA, ETrA, DGLA, ETA, ARA, EPA, behenic (22:0), DPA, DHA, lignoceric (24:0), nervonic (24:1), cerotic (26:0) and montanic (28:0) fatty acids.

[0119] Lipid peroxidation, which leads to rancidity in oils, most often affects PUFAs, because they contain multiple double bonds in between which lie methylene (i.e., —CH₂) groups that are especially reactive to hydrogen. The oxygen-dependent deterioration can occur non-enzymatically via a free radical chain reaction mechanism (i.e., autoxidation) or via photo-oxygenation; additionally, fatty acids may also be peroxidized via enzymatic peroxidation (i.e., via lipoxygenase enzymes). Furthermore, fatty acids may be autoxidized either in free form or combined into glycerolipids or glycolipids. Thus, oxidized triacylglycerol monomers include molecules containing different oxygenated groups, mainly hydroxyl-, keto- and epoxy-, as well as short-chain fatty acyl and short-chain n-oxo fatty acyl groups as the main products (Chang, S. S. et al., JOACS, 55:718 (1978); Velasco, J. et al., Eur. J. Lipid Sci. Technol., 106:728 (2004)). Autoxidation of fatty acids with more than 3 double bonds leads to even more complex mixtures of product (e.g., see Porter, N. A. et al., J. Am. Chem. Soc., 103:6447 (1981) and Bruna, E. et al., Lipids, 24:970 (1990) concerning autoxidation of arachidonic, pentaenoic and hexaenoic acids).

[0120] Based on the above, a recombinant oleaginous yeast engineered to co-produce both CoQ₁₀ and PUFAs should prove advantageous. It is expected that the presence of CoQ₁₀ should minimize overall lipid peroxidation and thus stabilize the PUFAs. Thus, described herein is a recombinant oleaginous yeast production host for the production of antioxidants and PUFAs comprising:
[0121] a) at least one copy of a ddsA gene encoding a decaprenyl diphosphate synthase, wherein expression of said decaprenyl diphosphate synthase enzyme results in the production of COQ₁₀; and,
[0122] b) a functional ω-3/ω-6 PUFA biosynthetic pathway, wherein expression of said ω-3/ω-6 PUFA biosynthetic pathway results in the production of at least one PUFA selected from the group consisting of: an ω-6 PUFA and an ω-3 PUFA;
   wherein said oleaginous yeast produces at least about 25 weight percent (%) of its DCW as oil.

[0123] Similarly, described herein is a method for the production of CoQ₁₀ and PUFAs in a recombinant oleaginous yeast, comprising:
[0124] a) providing an oleaginous yeast, the oleaginous yeast
   [0125] 1.) producing a quinone of the coenzyme Q series selected from the group consisting of: CoQ₆, CoQ₇, CoQ₈ and CoQ₉,; and,
   [0126] 2.) comprising genetic constructs encoding a functional ω-3/ω-6 polyunsaturated fatty acid biosynthetic pathway whereby the transformed yeast cells produce at least one polyunsaturated fatty acid;
[0127] b) transforming the oleaginous yeast host cell with at least one copy of a genetic construct encoding decaprenyl diphosphate synthase; and,
[0128] c) culturing the transformed yeast cells of step (b) under suitable conditions, whereby
   [0129] i.) the decaprenyl diphosphate synthase is expressed and whereby CoQ₁₀ is produced; and,
   [0130] ii.) the functional ω-3/ω-6 PUFA biosynthetic pathway is expressed and at least one PUFA is produced selected from the group consisting of LA, ALA, EDA, GLA, STA, ETrA, DGLA, ETA, ARA, DTA, DPAn-6, EPA, DPA and DHA.
      The oleaginous yeast preferably is a recombinant strain of Yarrowia lipolytica that has been previously engineered for high-level production of a preferred ω-3/ω-6 PUFA. Upon transformation with at least one ddsA gene using the methodology described previously, the resultant recombinant yeast will co-produce CoQ₁₀ and PUFAs.

[0131] A variety of means are available to increase the total amount of CoQ₁₀ that is produced in the above recombinant oleaginous yeast. For example, previous work in Yarrowia lipolytica has demonstrated that use of strong promoters, expression in multicopy, and/or codon-optimization of heterologous genes can very successfully be used as a means to increase expression. These tools should be equally applicable with respect to expression of decaprenyl diphosphate synthase (encoded by ddsA).

[0132] Manipulation of pathways and global regulators that affect production of CoQ₁₀ and/or down-regulation of the expression of specific genes within the CoQ₁₀ biosynthetic pathway that diminish overall accumulation of CoQ₁₀ are also contemplated by the Applicants herein as a means to increase CoQ₁₀ production. For example, it may be useful to disrupt the recombinant host organism's native E-polyprenyl diphosphate synthases that do not have decaprenyl diphosphate synthase activity, to thereby enable all CoQ production in the engineered recombinant host to be in the form of CoQ₁₀. Thus, when engineering Yarrowia lipolytica for CoQ₁₀ production, for example, it may prove useful to diminish or inactivate the organism's native solanesyl diphosphate synthase. Furthermore, rate limiting steps in the pathway can be identified and overcome by increasing the expression level of the genes involved.

[0133] Preferably, the CoQ₁₀ produced is at least about 0.0001% of the total DCW, more preferably at least about 0.001%, more preferably at least about 0.01%, even more preferably at least about 0.1% and most preferably at least about 1% of the total DCW.

[0134] The naturally produced CoQg and recombinantly produced CoQ₁₀ by Yarrowia lipolytica during fermentation is typically in a substantially reduced state. As used herein, “substantially reduced form of CoQ” or “substantially reduced” refers to a condition where the majority of the CoQ present in a composition is in the reduced form. In one aspect, substantially reduced refers to a condition whereby at least about 50% of the CoQ (percentage based on total CoQ present) in a composition is in the reduced state, preferably at least about 70% is in the reduced form, more preferably at least about 80% is in the reduced form, even more preferably at least about 90% is in the reduced form, yet even more preferably at least about 95% is in the reduced form, and most preferably at least about 98% of the CoQ in a composition is in the reduced form.

### Production of CoQ₁₀ PUFAs, and Carotenoids in Oleaginous Yeast Carotenoid Definitions and Biosynthetic Pathway

[0135] As used herein, the term “isoprenoid compound” refers to compounds formally derived from isoprene (2-methylbuta-1,3-diene; CH₂═C(CH₃)CH═CH₂), the skeleton of which can generally be discerned in repeated occurrence in the molecule. These compounds are produced biosynthetically via the isoprenoid pathway beginning with isopentenyl pyrophosphate (IPP) and formed by the head-to-tail condensation of isoprene units, leading to molecules which may be, for example, of 5, 10, 15, 20, 30, or 40 carbons in length.

[0136] As used herein, the term “carotenoid” refers to a class of hydrocarbons having a conjugated polyene carbon skeleton formally derived from isoprene. Although carotenoids can be of various lengths and can be acyclic or terminated with one (monocyclic) or two (bicyclic) cyclic end groups, for the purposes of the present application the term carotenoids will generally refer to C₄₀ carotenoids that consist of eight isoprenoid units joined in such a manner that the arrangement of isoprenoid units is reversed at the center of the molecule so that the two central methyl groups are in a 1,6-positional relationship and the remaining nonterminal methyl groups are in a 1,5-positional relationship. All C₄₀ carotenoids may be formally derived from the acyclic C₄₀H₅₆ structure. These molecules typically have strong light absorbing properties. Also, these compounds react destructively with oxygen and hence may require other antioxidant compounds that act as preservatives.

[0137] C₄₀ carotenoids may include both carotenes and xanthophylls. A “carotene” refers to a hydrocarbon carotenoid. The term “xanthophyll” refers to a C₄₀ carotenoid that contains one or more oxygen atoms in the form of hydroxy-, methoxy-, oxo-, epoxy-, carboxy- or aldehydic functional groups. Examples of xanthophylls include, but are not limited to: antheraxanthin, adonixanthin, astaxanthin, canthaxanthin, β-cryptoxanthin, keto-γ-carotene, echinenone, 3-hydroxyechinenone, 3′-hydroxyechinenone, zeaxanthin, adonirubin, tetrahydroxy-β,β′-caroten-4,4′-dione, tetrahydroxy-β,β′-caroten-4-one, caloxanthin, erythroxanthin, nostoxanthin, flexixanthin, 3-hydroxy-γ-carotene, 3-hydroxy-4-keto-γ-carotene, bacteriorubixanthin, bacteriorubixanthinal and lutein. In one aspect, preferred xanthophylls are selected from the group consisting of: lycopene, β-carotene, canthaxanthin, astaxanthin and zeaxanthin.

[0138] As used herein, the terms “carotenoid biosynthetic pathway” and “carotenoid pathway” will be used interchangeably and refer to those enzymes which convert farnesyl pyrophosphate (FPP) to a C₄₀ carotenoid. The enzymes within this pathway are encoded by the “crt” genes including, but not limited to: crtE, crtY, crtI, crtB, crtZ, crtO, and crtW. Finally, the term “carotenoid biosynthetic enzyme” is an inclusive term referring to any and all of the enzymes in the pathway involved in the biosynthesis of astaxanthin including, but not limited to: CrtE, CrtY, CrtI, CrtB, CrtZ, CrtO and CrtW.

[0139] The genetics of carotenoid biosynthesis are well known (Armstrong, G., in Comprehensive Natural Products Chemistry, Elsevier, v.2, pp 321-352 (1999)); Lee, P. and Schmidt-Dannert, C., Appl. Microbiol. Biotechnol., 60:1-11 (2002); Lee et al., Chem. Biol., 10:453-462 (2003), and Fraser, P. and Bramley, P. (Progress in Lipid Research, 43:228-265 (2004)). This pathway is extremely well studied in the Gram-negative, pigmented bacteria of the genera Pantoea, formerly known as Erwinia. Of particular interest are the genes responsible for the production of C₄₀ carotenoids used as pigments in animal feed (e.g., zeaxanthin, lutein, canthaxanthin and astaxanthin).

[0140] Although the enzymatic pathway involved in the biosynthesis of carotenoid compounds converts FPP to C₄₀ carotenoids, the pathway can be subdivided into two parts comprising: 1) the C₄₀ backbone genes (i.e., crtE, crtB, crtI, and crtY) encoding enzymes responsible for converting FPP to β-carotene; and, 2) subsequent functionalization genes (e.g., crtW, crtO, crtR, crtX and crtZ) responsible for adding various functional groups to the β-ionone rings of β-carotene (FIGS. 3A and 3B).

[0141] More specifically, the carotenoid biosynthetic pathway begins with the conversion of FPP to geranylgeranyl pyrophosphate (GGPP). In this first step, the enzyme geranylgeranyl pyrophosphate synthase (encoded by the crtE gene) condenses the C₁₅ FPP with a C₅ isopentenyl diphosphate (IPP), creating the C₂₀ compound GGPP. Thus, the term “CrtE” refers to a geranylgeranyl pyrophosphate synthase enzyme encoded by the crtE gene and which converts trans-trans-farnesyl diphosphate and IPP to pyrophosphate and GGPP. Next, a phytoene synthase (encoded by the gene crtB) condenses two GGPP molecules to form phytoene, the first C₄₀ carotenoid compound in the pathway. The term “CrtB” refers to a phytoene synthase enzyme encoded by the crtB gene which catalyzes the reaction from prephytoene diphosphate to phytoene. Subsequently, a series of sequential desaturations (i.e., producing the intermediaries of phytofluene, ζ-carotene and neurosporene) occur catalyzed by the enzyme phytoene desaturase (encoded by the gene crtI), resulting in the production of lycopene. As used herein, the term “CrtI” refers to a phytoene desaturase enzyme encoded by the crtI gene which converts phytoene into lycopene by the introduction of 4 double bonds. Finally, the enzyme lycopene cyclase (encoded by the gene crtY) forms β-ionone rings on each end of lycopene, forming the bicyclic carotenoid β-carotene. The term “CrtY” refers to a lycopene cyclase enzyme encoded by the crtY gene that converts lycopene to β-carotene.

[0142] The rings of β-carotene can subsequently be functionalized by a carotenoid ketolase (encoded by the genes crtW, crtO or bkt) and/or carotenoid hydroxylase (encoded by the genes crtZ or crtR) forming commercially important xanthophyll pigments such as canthaxanthin, astaxanthin and zeaxanthin. In terms of the ketolation and hydroxylation reactions, the CrtW-type ketolases and the CrtZ-type hydroxylases are preferred. The pathway from β-carotene to astaxanthin is somewhat non-linear in nature as a variety of intermediates can be formed (FIGS. 3A and 3B).

[0143] As used herein, the term “CrtW” refers to a β-carotene ketolase (also referred to as a carotenoid ketolase) enzyme encoded by the crtW gene that catalyzes an oxidation reaction where a keto group is introduced on the β-ionone type ring of cyclic carotenoids. This reaction converts cyclic carotenoids (i.e., β-carotene or zeaxanthin) into ketocarotenoids (i.e., canthaxanthin or astaxanthin, respectively). Intermediates in the process typically include echinenone and adonixanthin.

[0144] As used herein, the term “CrtO” refers to a β-carotene ketolase (also referred to as a carotenoid ketolase) enzyme encoded by the crtO gene that catalyzes an oxidation reaction where a keto group is introduced on the β-ionone type ring of cyclic carotenoids. The CrtO-type carotenoid ketolases are structurally unrelated to the CrtW-type ketolases. This reaction converts cyclic carotenoids (i.e., β-carotene or zeaxanthin) into ketocarotenoids (i.e., canthaxanthin or astaxanthin, respectively). Intermediates in the process typically include echinenone and adonixanthin. In one aspect, a mixture of CrtW-type and CrtO-type carotenoid ketolases are used to produce the desired ketocarotenoids.

[0145] As used herein, the term “CrtZ” refers to a carotenoid hydroxylase enzyme (also referred to herein as a “β-carotene hydroxylase”) encoded by the crtZ gene that catalyzes a hydroxylation reaction. The oxidation reaction adds a hydroxyl group to cyclic carotenoids having a β-ionone type ring.

[0146] It is known that CrtW ketolases, CrtO ketolases and CrtZ hydroxylases typically exhibit substrate flexibility, enabling production of a variety of ketocarotenoids or hydroxylated carotenoids, respectively, depending upon available substrates.

[0147] Genetically Engineered Oleaginous Yeast for Carotenoid Production

[0148] It has recently been demonstrated that oleaginous yeast can be engineered to produce C₄₀ carotenoids by integration of appropriate heterologous genes encoding cdE, crtY, crtI, crtB, crtZ, crtO and crtW into the host organism for production of any particular C₄₀ carotenoid of interest (see U.S. patent application Ser. No. 11/952,243 [Int'l. App. Pub. No. WO 2008/073367]).

[0149] The source of the carotenoid biosynthesis gene(s) to be heterologously expressed in an oleaginous yeast, such as Yarrowia lipolytica, may vary as carotenoid biosynthesis has been reported in a variety of organisms. Depending upon the source of carotenoid biosynthesis gene(s), it may be necessary to codon-optimize at least a portion (up to the entire length) of the gene targeted for heterologous expression using the preferred codon usage within the host cell. The preferred codon usage for Yarrowia lipolytica has previously been reported (see U.S. Pat. No. 7,125,672).

[0150] The genes required for carotenoid production are well-known in the art and can be selected based on the carotenoid targeted for production, as summarized in the Table below.

TABLE 3

| Genes Required For | | | | | | |
|---|---|---|---|---|---|---|
| Synthesis Of Various | | | | | crtW or | crtZ or |
| Carotenoids | crtE | crtB | crtI | crtY | crtO | crtR |
| Lycopene | 1 (+) | 1 (+) | 1 (+) | — | — | — |
| β-Carotene | 1 (+) | 1 (+) | 1 (+) | 1 (+) | — | — |
| Canthaxanthin | 1 (+) | 1 (+) | 1 (+) | 1 (+) | 1 (+) | — |
| Zeaxanthin | 1 (+) | 1 (+) | 1 (+) | 1 (+) | — | 1 (+) |
| Astaxanthin | 1 (+) | 1 (+) | 1 (+) | 1 (+) | 1 (+) | 1 (+) |

Note:
The designation 1 (+) represents “one or more”.

Thus, for example, production of a ketocarotenoid, such as canthaxanthin, will require expression of the C₄₀ backbone genes (i.e., crtE, crtB, crtI and crtY) and at least one carotenoid ketolase gene (i.e., crtW and/or crtO). Production of hydroxylated carotenoids, such as zeaxanthin and astaxanthin, require the expression of the C₄₀ backbone genes (i.e., crtE, crtB, crtI and crtY) and at least one carotenoid hydroxylating gene (i.e., crtZ).

[0151] Examples of suitable carotenoid biosynthesis genes include, but are not limited to those provided in Table 4.

TABLE 4
Sources of Genes Encoding the Carotenoid Biosynthetic Pathway

| Gene | GenBank ® Accession Number |
|---|---|
| crtE (GGPP | AB000835, AB016043, AB019036, AB016044, |
| Synthase) | AB027705, AB027706, AB034249, AB034250, |
| | AF020041, AF049658, AF049659, AF139916, |
| | AF279807, AF279808, AJ010302, |
| | AJ133724, AJ276129, D85029, L25813, L37405, U15778, |
| | U44876, X92893, X95596, X98795 and Y15112 |
| crtX | D90087, M87280 and M90698 |
| (Zeaxanthin | |
| glucosylase) | |
| crtY | AF139916, AF152246, AF218415, AF272737, AJ133724, |
| (Lycopene- | AJ250827, AJ276965, D58420, D83513, L40176, M87280, |
| β-cyclase) | U50738, U50739, U62808, X74599, X81787, X86221, |
| | X86452, X95596 and X98796 |
| crtI | AB046992, AF039585, AF049356, AF139916, AF218415, |
| (Phytoene | AF251014, AF364515, D58420, D83514, L16237, L37405, |
| desaturase) | L39266, M64704, M88683, S71770, U37285, U46919, |
| | U62808, X55289, X59948, X62574, X68058, X71023, |
| | X78271, X78434, X78815, X86783, Y14807, Y15007, |
| | Y15112, Y15114 and Z11165 |
| crtB | AB001284, AB032797, AB034704, AB037975, AF009954, |
| (Phytoene | AF139916, AF152892, AF218415, AF220218, AJ010302, |
| synthase) | AJ133724, AJ278287, AJ304825 and AJ308385, D58420, |
| | L23424, L25812, L37405, M38424, M87280, S71770, |
| | U32636, U62808, U87626, U91900, X52291, X60441, |
| | X63873, X68017, X69172 and X78814 |
| crtZ (β- | D58420, D58422, D90087, M87280, U62808 and Y15112 |
| carotene | |
| hydro- | |
| xyllase) | |
| crtW (β- | AF218415, D45881, D58420, D58422, X86782 and |
| carotene | Y15112 |
| ketolase) | |

[0152] Preferred sources of carotenoid biosynthesis genes are from Pantoea stewartii (ATCC #8199; Int'l. App. Pub. No. WO 2002/079395), Pantoea stewartii DC413 (U.S. Pat. No. 7,288,387), Pantoea agglomerans DC404 (U.S. Pat. No. 6,929,928), Enterobacteriaceae DC260 (U.S. Pat. No. 7,064,196), Brevundimonas vesicularis DC263 (U.S. Pat. No. 7,252,985 and U.S. Pat. No. 7,091,031), Sphingomonas melonis DC18 (U.S. Pat. No. 7,252,985), Novosphingobium aromaticivorans ATCC #700278 (U.S. Pat. No. 7,091,031) and Agrobacterium aurantiacum (U.S. Pat. No. 5,811,273, U.S. Pat. No. 5,972,690 and U.S. Pat. No. 6,150,130).

[0153] By using various combinations of the genes presented in Table 4, a variety of C₄₀ carotenoids can be made from FPP. Furthermore, one of skill in the art recognizes that the copy number and/or the expression level of each gene can be altered for optimal carotenoid production. The recombinant oleaginous yeast may comprise at least one copy of each gene required to produce the desired carotenoid. More preferred, the recombinant oleaginous yeast comprises a plurality of each gene required to produce the desired carotenoid. To clarify, for example, if 2 copies of a crtY are required, this can refer to: 1) two copies of an identical coding sequence for a particular crtY isolated from a single species; or, 2) one coding sequence for crtY isolated from a species “A” and one coding sequence for a crtY isolated from a species “B”, thus collectively resulting in two crtY genes.

[0154] It is also understood that one or more genes in the mevalonate pathway may be overexpressed to increase carotenoid production. This is especially true when the concentration of FPP appears to be limited.

[0155] It is also understood that one or more genes encoding enzymes that direct carbon flow away from carotenoid biosynthesis may be downregulated and/or disrupted (assuming it is not an essential gene) to increase carotenoid and/or isoprenoid production. Means to down-regulate and/or disrupt genes are well known in the art (Maniatis, supra).

[0156] Numerous oleaginous yeast could be engineered for production of preferred C₄₀ carotenoids based on the teachings in co-pending U.S. patent application Ser. No. 11/952,243 [Int'l. App. Pub. No. WO 2008/073367]. Representative carotenoid-producing strains of the oleaginous yeast Yarrowia lipolytica described therein include the following: Y. lipolytica strain LY5 (producing lycopene), the Y. lipolytica YCS1001-YCS1010 series and YCS1011-YCS1020 series (producing lycopene), the Y. lipolytica YCS1200 series and YCS1300 series (producing primarily β-carotene), the Y. lipolytica YCS3700 series and YCS4100 series (producing zeaxanthin), and the Y. lipolytica YCS4100 series (producing canthaxanthin). Although these strains are not high-producing, they are suitable to demonstrate proof of concept. Following the teachings provided to enable high-level production of various PUFAs (e.g., use of strong promoters, expression of genes in high copy number), similar strategies could readily be applied to enable one skilled in the art to genetically engineer a strain of Y. lipolytica having the ability to produce high titers of preferred C₄₀ carotenoids, wherein the total C₄₀ carotenoid in the microbial host is preferably at least about 100 ppm, more preferably at least about 500 ppm and most preferably at least about 1000 ppm.

[0157] It should be noted that, for those recombinant oleaginous yeast hosts that produce more than one carotenoid, it will sometimes be possible to adjust the relative amounts of individual carotenoids produced by adjusting growth conditions. For example, it has been reported that controlling the concentration of dissolved oxygen in a culture during cultivation can regulate relative production levels of certain carotenoids such as β-carotene, echinenone, β-cryptoxanthin, 3-hydroxyechinenone, asteroidenone, canthaxanthin, zeaxanthin, adonirubin, adonixanthin and astaxanthin (see, for example, U.S. Pat. No. 6,825,002).

### Genetically Engineered Oleaginous Yeast for CoQ₁₀ PUFA and Carotenoid Production

[0158] Also provided herein are recombinant oleaginous yeast producing CoQ₁₀, PUFAs and C₄₀ carotenoids. A PUFA-producing yeast is effectively transformed with the genetic elements of the C₄₀ pathway as described herein and a gene (ddsA) responsible for the condensation reaction that polymerizes prenyl diphosphate (an allylic primer) and 3-isopentenyl diphosphate (IPP) to produce polyprenyl diphosphate. Enzymes of particular usefulness in the expression of C₄₀ carotenoids include, but are not limited to phytoene synthase (crtB), phytoene desaturase (crtI), lycopene cyclase (crtY), carotenoid hydroxylase (crtZ), and a carotenoid ketolase (crtW). Carotenoids of particular relevance herein include but are not limited to: lycopene, β-carotene, zeaxanthin, lutein, canthaxanthin and astaxanthin. ω-3 PUFAs including ALA, STA, ETA, ETrA, EPA, DPA and DHA and ω-6 PUFAs including LA, GLA, EDA, DGLA, ARA, DTA and DPAn-6 are of particular interest. PUFA synthesis may take many paths but generally utilizes enzymes selected from the group consisting of desaturases (e.g., Δ4, Δ5, Δ6, Δ8, Δ9, Δ12, Δ15, Δ17 desaturases) and elongases (e.g., Δ9 elongases and C_{14/16}, C_{16/18}, C_{18/20} and C_{20/22} elongases).

[0159] These host may be genetically engineered using methods well known in the art.

### Microbial Expression Systems, Cassettes & Vectors, and Transformation

[0160] Microbial expression systems and expression vectors containing regulatory sequences that direct high level expression of foreign proteins are well known to those skilled in the art. Any of these could be used to construct chimeric genes for production of the desired compounds, that is, CoQ₁₀ and PUFAs (and optionally, C₄₀ carotenoids). These chimeric genes could then be introduced into appropriate microorganisms via transformation to allow for high level expression of the enzymes.

[0161] Vectors (e.g., constructs, plasmids) and DNA expression cassettes are well known in the art. The specific choice of sequences present in the construct is dependent upon the desired expression products (supra), the nature of the host cell and the proposed means of separating transformed cells versus non-transformed cells. Typically, however, the vector contains at least one expression cassette, a selectable marker and sequences allowing autonomous replication or chromosomal integration. Suitable expression cassettes comprise a region 5′ of the gene that controls transcriptional initiation (e.g., a promoter), the gene coding sequence, and a region 3′ of the DNA fragment that controls transcriptional termination (i.e., a terminator). It is most preferred when both control regions are derived from genes homologous to the transformed host cell, although it is to be understood that such control regions need not be derived from the genes native to the specific species chosen as a production host.

[0162] Initiation control regions or promoters, which are useful to drive expression of the relevant genes in the desired yeast host cell are numerous and familiar to those skilled in the art. Virtually any promoter capable of directing expression of these genes in the selected host cell is suitable. Expression in a host cell can be accomplished in a transient or stable fashion. Transient expression can be accomplished by inducing the activity of a regulatable promoter operably linked to the gene of interest. Stable expression can be achieved by the use of a constitutive promoter operably linked to the gene of interest. As an example, when the host cell is yeast, transcriptional and translational regions functional in yeast cells are provided, particularly from the host species (e.g., see U.S. Pat. No. 7,238,482 and Int'l.

[0163] App. Pub. No. WO 2006/052870 [U.S. Publication 2006-0115881-A1] for preferred transcriptional initiation regulatory regions for use in Yarrowia lipolytica). Any one of a number of regulatory sequences can be used, depending upon whether constitutive or induced transcription is desired, the efficiency of the promoter in expressing the ORF of interest, the ease of construction and the like.

[0164] Nucleotide sequences surrounding the translational initiation codon ‘ATG’ have been found to affect expression in yeast cells. If the desired polypeptide is poorly expressed in yeast, the nucleotide sequences of exogenous genes can be modified to include an efficient yeast translation initiation sequence to obtain optimal gene expression. For expression in yeast, this can be done by site-directed mutagenesis of an inefficiently expressed gene by fusing it in-frame to an endogenous yeast gene, preferably a highly expressed gene. Alternatively, as demonstrated in Yarrowia lipolytica, one can determine the consensus translation initiation sequence in the host and engineer this sequence into heterologous genes for their optimal expression in the host of interest.

[0165] Termination control regions may be derived from various genes native to the preferred hosts. Optionally, a termination site may be unnecessary; however, it is most preferred if included. As used herein, the termination region can be derived from the 3′ region of the gene from which the initiation region was obtained or from a different gene. A large number of termination regions are known and function satisfactorily in a variety of hosts (when utilized both in the same and different genera and species from where they were derived). Typically, the termination region usually is selected more as a matter of convenience rather than because of any particular property. For the purposes herein, wherein the host cell is an oleaginous yeast, the termination region is preferably derived from a yeast gene, particularly Saccharomyces, Schizosaccharomyces, Candida, Yarrowia or Kluyveromyces. The 3′-regions of mammalian genes encoding γ-interferon and α-2 interferon are also known to function in yeast. Although not intended to be limiting, preferred termination regions useful in the disclosure herein include: ˜100 bp of the 3′ region of the Yarrowia lipolytica extracellular protease (Xpr; GenBank® Accession No. M17741); the acyl-CoA oxidase (Aco3: GenBank® Accession No. AJ001301 and No. CAA04661; Pox3: GenBank® Accession No. XP_{—}503244) terminators; the Pex20 (GenBank® Accession No. AF054613) terminator; the Pex16 (GenBank® Accession No. U75433) terminator; the Lip1 (GenBank® Accession No. Z50020) terminator; the Lip2 (GenBank® Accession No. AJ012632) terminator; and the 3-oxoacyl-coA thiolase (Oct; GenBank® Accession No. X69988) terminator.

[0166] As one of skill in the art is aware, merely inserting a gene into a cloning vector does not ensure that it will be successfully expressed at the level needed. In response to the need for a high expression rate, many specialized expression vectors have been created by manipulating a number of different genetic elements that control aspects of transcription, translation, protein stability, oxygen limitation and secretion from the microbial host cell. More specifically, some of the molecular features that have been manipulated to control gene expression include: 1) the nature of the relevant transcriptional promoter and terminator sequences; 2) the number of copies of the cloned gene and whether the gene is plasmid-borne or integrated into the genome of the host cell; 3) the final cellular location of the synthesized foreign protein; 4) the efficiency of translation and correct folding of the protein in the host organism; 5) the intrinsic stability of the mRNA and protein of the cloned gene within the host cell; and, 6) the codon usage within the cloned gene, such that its frequency approaches the frequency of preferred codon usage of the host cell. Each of these types of modifications are encompassed herein, as means to further optimize expression of the required ddsA genes and PUFA biosynthetic genes (and optionally carotenoid biosynthetic genes). Methods of codon-optimizing foreign genes for optimal expression in Yarrowia lipolytica are set forth in U.S. Pat. No. 7,125,672.

[0167] Once the DNA encoding a polypeptide suitable for expression in an appropriate microbial host cell (e.g., oleaginous yeast) has been obtained (e.g., a chimeric gene comprising a promoter, ORF and terminator), it is placed in a plasmid vector capable of autonomous replication in a host cell, or it is directly integrated into the genome of the host cell. Integration of expression cassettes can occur randomly within the host genome or can be targeted through the use of constructs containing regions of homology with the host genome sufficient to target recombination within the host locus. Where constructs are targeted to an endogenous locus, all or some of the transcriptional and translational regulatory regions can be provided by the endogenous locus.

[0168] Constructs comprising a coding region of interest may be introduced into a host cell by any standard technique. These techniques include transformation (e.g., lithium acetate transformation [Guthrie, C., Methods in Enzymology, 194:186-187 (1991)]), protoplast fusion, biolistic impact, electroporation, microinjection, or any other method that introduces the gene of interest into the host cell. More specific teachings applicable for oleaginous yeast (i.e., Yarrowia lipolytica) include U.S. Pat. No. 4,880,741 and No. 5,071,764 and Chen, D. C. et al. (Appl. Microbiol. Biotechnol., 48(2):232-235 (1997)).

[0169] The preferred method of expressing genes in Yarrowia lipolytica is by integration of linear DNA into the genome of the host; and, integration into multiple locations within the genome can be particularly useful when high level expression of genes are desired. For example, preferred loci for integration include: the Ura3 locus (GenBank® Accession No. AJ306421), the Leu2 gene locus (GenBank® Accession No. AF260230), the Lys5 gene (GenBank® Accession No. M34929), the Aco2 gene locus (GenBank® Accession No. AJ001300), the Pox3 gene locus (Pox3: GenBank® Accession No. XP_{—}503244; or, Aco3: GenBank® Accession No. AJ001301), the Δ12 desaturase gene locus (U.S. Pat. No. 7,214,491), the Lip1 gene locus (GenBank® Accession No. Z50020), the Lip2 gene locus (GenBank® Accession No. AJ012632), the SCP2 gene locus (GenBank® Accession No. AJ431362), the Pex3 gene locus (GenBank® Accession No. CAG78565), the Pex16 gene locus (GenBank® Accession No. CAG79622) and/or the Pex10 gene locus (GenBank® Accession No. CAG81606).

[0170] Where two or more genes are expressed from separate replicating vectors, it is desirable that each vector has a different means of selection and should lack homology to the other construct(s) to maintain stable expression and prevent reassortment of elements among constructs. Judicious choice of regulatory regions, selection means and method of propagation of the introduced construct(s) can be experimentally determined so that all introduced genes are expressed at the necessary levels to provide for synthesis of the desired products.

[0171] For convenience, a host cell that has been manipulated by any method to take up a DNA sequence (e.g., an expression cassette) will be referred to as “transformed” or “recombinant” herein. The transformed host will have at least one copy of the expression construct and may have two or more, depending upon whether the gene is integrated into the genome, amplified, or is present on an extrachromosomal element having multiple copy numbers.

[0172] The transformed host cell can be identified by various selection techniques, as described in U.S. Pat. No. 7,238,482 and Int'l. App. Pub. No. WO 2006/052870 [U.S. Publication 2006-0115881-A1]. Preferred selection methods for use herein are resistance to kanamycin, hygromycin and the amino glycoside G418, as well as ability to grow on media lacking uracil, leucine, lysine, tryptophan or histidine. Alternately, 5-fluoroorotic acid (5-fluorouracil-6-carboxylic acid monohydrate; “5-FOA”) is used for selection of yeast Ura⁻ mutants. The compound is toxic to yeast cells that possess a functioning URA3 gene encoding orotidine 5′-monophosphate decarboxylase (OMP decarboxylase); thus, based on this toxicity, 5-FOA is especially useful for the selection and identification of Ura⁻ mutant yeast strains (Bartel, P. L. and Fields, S., Yeast 2-Hybrid System, Oxford University: New York, v. 7, pp 109-147, 1997). More specifically, one can first knockout the native Ura3 gene to produce a strain having a Ura− phenotype, wherein selection occurs based on 5-FOA resistance. Then, a cluster of multiple chimeric genes and a new Ura3 gene can be integrated into a different locus of the Yarrowia genome to thereby produce a new strain having a Ura+ phenotype. Subsequent integration produces a new Ura3− strain (again identified using 5-FOA selection), when the introduced Ura3 gene is knocked out. Thus, the Ura3 gene (in combination with 5-FOA selection) can be used as a selection marker in multiple rounds of transformation.

[0173] An alternate preferred selection method utilized herein relies on a dominant, non antibiotic marker for Yarrowia lipolytica based on sulfonylurea resistance (see Int'l. App. Pub. No. WO 2006/052870 for additional details). The technique is also generally applicable to other industrial yeast strains that may be haploid, diploid, aneuploid or heterozygous. Specifically, the sulfonylurea resistance selection marker utilized herein for transforming Yarrowia lipolytica does not rely on a foreign gene but on a mutant native gene. Thus, it neither requires auxotrophy nor results in auxotrophy and allows transformation of wild type strains. More specifically, the marker gene (SEQ ID NO:1) is a native acetohydroxyacid synthase (AHAS or acetolactate synthase; E.C. 4.1.3.18) that has a single amino acid change (W497L) that confers sulfonyl urea herbicide resistance. AHAS is the first common enzyme in the pathway for the biosynthesis of branched-chain amino acids and it is the target of the sulfonylurea and imidazolinone herbicides. The W497L mutation has been reported in Saccharomyces cerevisiae (Falco, S. C., et al., Dev. Ind. Microbiol., 30:187-194 (1989); Duggleby, R. G., et. al., Eur. J. Biochem., 270:2895 (2003)).

[0174] An additional method for recycling a selection marker relies on site-specific recombinase systems. Briefly, the site-specific recombination system consists of two elements: 1) a recombination site having a characteristic DNA sequence [e.g., LoxP]; and, 2) a recombinase enzyme that binds to the DNA sequence specifically and catalyzes recombination (i.e., excision) between DNA sequences when two or more of the recombination sites are oriented in the same direction at a given interval on the same DNA molecule [e.g., Cre]. This methodology has utility as a means of selection, since it is possible to “recycle” a pair of preferred selection markers for their use in multiple sequential transformations.

[0175] Specifically, an integration construct is created comprising a target gene that is desirable to insert into the host genome (e.g., a ddsA gene), as well as a first selection marker (e.g., ura) that is flanked by recombination sites. Following transformation and selection of the transformants, the first selection marker is excised from the chromosome by the introduction of a replicating plasmid carrying a second selection marker (e.g., sulfonylurea resistance [AHAS]) and a recombinase suitable to recognize the site-specific recombination sites introduced into the genome. Upon selection of those transformants carrying the second marker and confirmation of excision of the first selection marker from the host genome, the replicating plasmid is then cured from the host in the absence of selection. This produces a transformant that possesses neither the first nor second selection marker, and thus the cured strain is available for another round of transformation. One skilled in the art will recognize that the methodology is not limited to the particular selection markers or site-specific recombination system used in the present description.

### Metabolic Engineering in Microbes

[0176] Methods for manipulating biochemical pathways are well known to those skilled in the art; and, it is expected that numerous manipulations will be possible to maximize CoQ₁₀ and PUFA production (and optionally C₄₀ carotenoid biosynthesis) in oleaginous yeasts, and particularly, in Yarrowia lipolytica. This may require metabolic engineering directly within the CoQ₁₀, PUFA and/or C₄₀ carotenoid biosynthetic pathway or additional coordinated manipulation of various other metabolic pathways.

[0177] In the case of manipulations within the CoQ₁₀ biosynthetic pathway, it may be desirable to increase the production of FPP to enable increased production of CoQ₁₀. Introducing and/or amplifying the idi gene (responsible for isomerization of IPP to dimethyl allyl diphosphate, a rate limiting step in the biosynthesis of carotenoids genes [Wang et al., Biotechnol. Bioeng., 62:235-241 (1999)]) may accomplish this. Similarly, to maximize production of CoQ₁₀, it is well known to one skilled in the art that production is favored in a host microorganism whose native E-polyprenyl diphosphate synthase is removed or inhibited, thereby minimizing production of other quinones of the coenzyme Q series, that is Q₆, Q₇, Q₈ and Q₉. The endogenous desaturase activity can be reduced or eliminated by, for example: 1) providing a cassette for transcription of antisense sequences to the native E-polyprenyl diphosphate synthase transcription product; 2) disrupting the native E-polyprenyl diphosphate synthase gene through insertion, substitution and/or deletion of all or part of the target gene; or, 3) using a host cell which naturally has [or has been mutated to have] low native E-polyprenyl diphosphate synthase activity.

### Microbial Fermentation Processes

[0178] The transformed microbial host cell is grown under conditions that optimize expression of chimeric genes and produce the greatest and the most economical yield of desired CoQ₁₀ and PUFAs (and optionally, C₄₀ carotenoids). In general, media conditions that may be optimized include the type and amount of carbon source, the type and amount of nitrogen source, the carbon-to-nitrogen ratio, the oxygen level, growth temperature, pH, length of the biomass production phase, length of the oil accumulation phase and the time and method of cell harvest. Microorganisms of interest, such as oleaginous yeast (e.g., Yarrowia lipolytica) are generally grown in complex media (e.g., yeast extract-peptone-dextrose broth (YPD)) or a defined minimal media that lacks a component necessary for growth and thereby forces selection of the desired expression cassettes (e.g., Yeast Nitrogen Base (DIFCO Laboratories, Detroit, Mich.)).

[0179] Fermentation media for the methods and host cells described herein must contain a suitable carbon source such as are taught in U.S. Pat. No. 7,238,482. Suitable sources of carbon encompass a wide variety of sources, with sugars, glycerol and/or fatty acids being preferred. Most preferred is glucose and/or fatty acids containing between 10-22 carbons.

[0180] Nitrogen may be supplied from an inorganic (e.g., (NH₄)₂SO₄) or organic (e.g., urea or glutamate) source. In addition to appropriate carbon and nitrogen sources, the fermentation media must also contain suitable minerals, salts, cofactors, buffers, vitamins and other components known to those skilled in the art suitable for the growth of the oleaginous host and promotion of the enzymatic pathways necessary for CoQ₁₀ and PUFA production (and optionally, C₄₀ carotenoid production). Particular attention is given to several metal ions (e.g., Fe⁺², Cu⁺², Mn⁺², Co⁺², Zn⁺², Mg⁺²) that promote synthesis of lipids and PUFAs (Nakahara, T. et al., Ind. Appl. Single Cell Oils, D. J. Kyle and R. Colin, eds. pp 61-97 (1992)).

[0181] Preferred growth media in the present invention are common commercially prepared media, such as Yeast Nitrogen Base (DIFCO Laboratories, Detroit, Mich.). Other defined or synthetic growth media may also be used and the appropriate medium for growth of the transformant host cells will be known by one skilled in the art of microbiology or fermentation science. A suitable pH range for the fermentation is typically between about pH 4.0 to pH 8.0, wherein pH 5.5 to pH 7.5 is preferred as the range for the initial growth conditions. The fermentation may be conducted under aerobic or anaerobic conditions, wherein microaerobic conditions are preferred.

[0182] Typically, accumulation of high levels of CoQ₁₀ and PUFAs (and optionally C₄₀ carotenoids) in oleaginous yeast cells requires a two-stage process, since the metabolic state must be “balanced” between growth and synthesis/storage of fats. Thus, most preferably, a two-stage fermentation process is necessary for production in oleaginous yeast (e.g., Yarrowia lipolytica). This approach is described in U.S. Pat. No. 7,238,482, as are various suitable fermentation process designs (i.e., batch, fed-batch and continuous) and considerations during growth.

### Purification and Processing of CoQ₁₀ and PUFAs

[0183] The primary product is oleaginous yeast biomass. As such, isolation and purification of the CoQ₁₀- and PUFA-containing oils (optionally including carotenoids) from the biomass may not be necessary (i.e., wherein the biomass is the product).

[0184] However, certain end uses may require partial and/or complete isolation/purification of the CoQ₁₀- and PUFA-containing oils (optionally including carotenoids) from the biomass. Given the lipophilic/hydrophobic nature of carotenoids, many techniques applied to isolate/purify microbially produced oils/PUFAs should work to isolate carotenoids as well, especially when the desired product is a pigmented oil. As such, any number of well known techniques can be used to isolate the lipophilic/hydrophobic compounds from the biomass including, but not limited to extraction (e.g., U.S. Pat. No. 6,797,303 and No. 5,648,564) with organic solvents, sonication, supercritical fluid extraction (e.g., using carbon dioxide), saponification and physical means such as presses, or combinations thereof. One is referred to the teachings of U.S. Pat. No. 7,238,482 for additional details.

[0185] One review of PUFA extraction techniques, quality analysis and acceptability standards for yeast lipids is that of Z. Jacobs (Critical Reviews in Biotechnology, 12(5/6):463-491 (1992)). A brief review of downstream processing is also available by A. Singh and O. Ward (Adv. Appl. Microbiol., 45:271-312 (1997)).

### Use of Compositions Comprising CoQ₁₀

[0186] Given the desire for natural antioxidants in the e.g., food/feed industry and the proven ability to recombinantly produce CoQ₁₀ and ω-3/ω-6 PUFAs in an oleaginous yeast, it is expected that the CoQ₁₀ may function as a useful antioxidant to stabilize ω-3/ω-6 PUFAs and ω-3/ω-6 PUFA/C₄₀ carotenoid mixtures. As such, a method to stabilize microbially produced PUFAs and PUFA/carotenoid mixtures using CoQ₁₀ is provided. Similarly, “stabilized microbial oils” are provided herein, wherein one of skill in the art of processing and formulation will understand how the amount and composition of the stabilized microbial oil may be added to the product. Such an amount will be referred to herein as an “effective” amount and will depend on the food or feed product, the diet that the product is intended to supplement or the medical condition that the medical food or medical nutritional is intended to correct or treat.

[0187] The term “stabilized microbial oils” refers herein to a microbial oil comprising CoQ₁₀ as an antioxidant and at least one ω-3/ω-6 PUFA (and optionally comprising at least one C₄₀ carotenoid). Preferably, the CoQ₁₀ is present in an “effective” amount, wherein the term “effective amount of microbially-produced antioxidant” refers to the amount of a microbially-produced antioxidant that is effective in decreasing the rate of oxidation of a C₄₀ carotenoid pigment, an ω-3/ω-6 PUFA, or mixtures thereof (or any other compound that is subject to oxidation). One of skill in the art recognizes that the antioxidant will typically be used in a substantially reduced form and that an effective amount of microbially-produced antioxidant varies according to the product and/or product formulation according to target species and/or end use. Typically, the amount of antioxidant incorporated into the product takes into account losses associated with processing conditions, typical handling and storage conditions and the stability of the antioxidant in the product, to name a few. Preferably, the amount of antioxidant produced by the oleaginous yeast biomass is at least about 0.0001 wt %, preferably at least about 0.001 wt %, even more preferably at least about 0.01 wt %, and most preferably at least about 0.1 wt % (based on DCW).

[0188] The amount of PUFA present in the “stabilized microbial oils” described herein is an “effective” amount wherein the term “effective amount of a PUFA” refers to the amount of a microbially produced ω-3/ω-6 PUFA incorporated into a product formulation that is sufficient to provide the desirable health characteristics associated with ω-3/ω-6 PUFA consumption. One of skill in the art can vary the amount and type of PUFA incorporated into the product formulation according to target species and/or end use. Typically, the amount of PUFA incorporated into the product takes into account losses associated with processing conditions, typical handling and storage conditions, the stability of the PUFA in the product, and the bioavailability/bioabsorption efficiency with the target species, to name a few.

[0189] The amount of C₄₀ carotenoid (or “pigment”) present in the “stabilized microbial oils” described herein is an “effective” amount, wherein the term “effective amount of pigment” refers to the amount of pigment incorporated into an animal feed product that effectively pigments at least one animal tissue (e.g., chicken products such as egg yolks; crustacean muscle tissue and/or shell tissue; fish muscle tissue and/or skin tissue, etc.) under feeding conditions considered suitable for growth of the target animal species. The amount of pigment incorporated into the animal feed may vary according to target species. Typically, the amount of pigment product incorporated into the feed product takes into account pigmentation losses associated with feed processing conditions, typical handling and storage conditions, the stability of the pigment in the feed, the bioavailability/bioabsorption efficiency of the particular species, the pigmentation rate of the animal tissue targeted for pigmentation, and the overall profile of pigment isomers (wherein some are preferentially absorbed over others), to name a few. In one aspect, the effective amount of pigment in the pigmented feed is at least about 10 mg/kg feed, preferably at least about 10 mg/kg to about 250 mg/kg, more preferably about 20 mg/kg to about 100 mg/kg, and most preferably about 30 mg/kg to about 100 mg/kg feed. Alternately, the “effective amount of pigment” may also refer to an amount of carotenoid pigment added to effectively function as an additional antioxidant in the target application.

[0190] The present oleaginous yeast biomass comprising CoQ₁₀ and at least one ω-3/ω-6 PUFA (and optionally at least one C₄₀ carotenoid) can be prepared and sold in a variety of product forms including, but not limited to whole cell biomass, partially purified biomass, purified oil, and purified CoQ₁₀. The product form will depend upon the targeted end use.

[0191] An animal feed, food product, dietary supplement, pharmaceutical composition, infant formula, or personal care product comprising oleaginous yeast biomass comprising the antioxidant CoQ₁₀ and at least one ω-3/ω-6 PUFA (and optionally at least one C₄₀ carotenoid) is also provided herein. It is contemplated that the stabilized microbial oils comprising CoQ₁₀ and ω-3/ω-6 PUFAs will function in each of these applications to impart the health benefits of current formulations using more traditional sources of ω-3/ω-6 PUFAs. Similarly, an animal feed, food product, dietary supplement, pharmaceutical composition, infant formula, or personal care product comprising a stabilized microbial oil isolated from the recombinant oleaginous yeast biomass is also provided. Preferably, the yeast biomass comprises at least about 25 wt % oil, more preferably at least about 30-40 wt %, and most preferably at least about 40-50 wt % microbially-produced oil.

[0192] Food Products and Infant Formulas

[0193] Stabilized microbial oils containing ω-3/ω-6 PUFAs and optionally at least one C₄₀ carotenoid will be suitable for use in a variety of food and feed products including, but not limited to food analogs, meat products, cereal products, baked foods, snack foods and dairy products. Alternatively, the stabilized PUFAs (or derivatives thereof) may be incorporated into cooking oils, fats or margarines formulated so that in normal use the recipient would receive the desired amount for dietary supplementation. The stabilized PUFAs may also be incorporated into infant formulas, nutritional supplements or other food products and may find use as anti-inflammatory or cholesterol lowering agents.

[0194] The term “food product” refers to any food generally suitable for human consumption. This definition encompasses a “food analog”, i.e., a food-like product manufactured to resemble its food counterpart, whether meat, cheese, milk or the like, and that is intended to have the appearance, taste, and texture of its counterpart. Typical food products include but are not limited to meat products, cereal products, baked foods, snack foods, fried foods, beverages, dairy products, infant formulas and the like. Description of each of these product classes is provided in Int'l. App. Pub. No. WO 2006/052870 [U.S. Publication 2006-0115881-A1].

[0195] Additional food products into which the stabilized microbial oils could be included are, for example: chewing gums, confections and frostings, gelatins and puddings, hard and soft candies, jams and jellies, white granulated sugar, sugar substitutes, sweet sauces, toppings and syrups, and dry-blended powder mixes.

[0196] Health Food Products and Pharmaceuticals

[0197] A health food product is any food product that imparts a health benefit and include “functional foods”, “medical foods”, “medical nutritionals” and “dietary supplements”. Description of each of these product classes is provided in Int'l. App. Pub. No. WO 2006/052870 [U.S. Publication 2006-0115881-A1].

[0198] Stabilized microbial oils of the invention may also be used in standard pharmaceutical compositions. The term “pharmaceutical” means a compound or substance which if sold in the United States would be controlled by e.g., Section 505 of the Federal Food, Drug and Cosmetic Act.

[0199] Engineered strains of oleaginous yeast (engineered to produce CoQ₁₀ and at least one ω-3/ω-6 PUFA [and optionally at least one C₄₀ carotenoid]) or the stabilized microbial oils produced therefrom could readily be incorporated into the any of the above mentioned health food products, to thereby produce e.g., a functional or medical food. For example more concentrated formulations comprising CoQ₁₀ and ω-3/ω-6 PUFAs (e.g., ARA or EPA) include capsules, powders, tablets, softgels, gelcaps, liquid concentrates and emulsions which can be used as a dietary supplement in humans or animals other than humans. Similarly, compositions comprising CoQ₁₀ and at least one ω-3/ω-6 PUFA (and optionally at least one C₄₀ carotenoid) can be used as dietary substitutes, or supplements, particularly infant formulas, for patients undergoing intravenous feeding or for preventing or treating malnutrition. Optionally, the compositions may be used for pharmaceutical use (human or veterinary). In this case, the stabilized PUFAs are generally administered orally but can be administered by any route by which they may be successfully absorbed, e.g., parenterally (e.g., subcutaneously, intramuscularly or intravenously), rectally, vaginally or topically (e.g., as a skin ointment or lotion).

[0200] Animal Feed Products

[0201] Animal feeds are generically defined herein as products intended for use as feed or for mixing in feed for animals other than humans. More specifically, the term “animal feed” refers to feeds intended exclusively for consumption by animals, including domestic animals (e.g., pets, farm animals, home aquarium fish, etc.) or for animals raised for the production of food (e.g., poultry, eggs, fish, crustacea, etc.).

[0202] More specifically, although not limited therein, it is expected that the recombinant oleaginous yeast described herein or stabilized microbial oils thereof can be used within pet food products, ruminant and poultry food products and aquacultural food products. Pet food products are those products intended to be fed to a pet (e.g., a dog, cat, bird, reptile, rodent); these products can include the cereal and health food products above, as well as meat and meat byproducts, soy protein products, grass and hay products (e.g., alfalfa, timothy, oat or brome grass, vegetables). Ruminant and poultry food products are those wherein the product is intended to be fed to e.g., turkeys, chickens, cattle and swine. As with the pet foods above, these products can include cereal and health food products, soy protein products, meat and meat byproducts, and grass and hay products as listed above. Aquacultural food products (or “aquafeeds”) are those products intended to be used in aquafarming which concerns the propagation, cultivation or farming of aquatic organisms and/or animals in fresh or marine waters. More specifically, the term “aquaculture” refers to the production and sale of farm raised aquatic plants and animals. Typical examples of animals produced through aquaculture include, but are not limited to: lobsters, shrimp, prawns, and fish (i.e., ornamental and/or food fish).

[0203] The biomass and/or stabilized microbial oils (comprising CoQ₁₀ and (ω-3/ω-6 PUFAs [and optionally C₄₀ carotenoids]) can be used as an ingredient in any of the animal feeds described above. In addition to providing necessary ω-3/ω-6 PUFAs in a stabilized form (and optionally, carotenoid pigment), the oleaginous yeast itself is a useful source of protein and other nutrients (e.g., vitamins, minerals, nucleic acids, complex carbohydrates, etc.) that can contribute to overall animal health and nutrition, as well as increase a formulation's palatability. Accordingly it is contemplated that the addition of yeast biomass comprising the recombinant production hosts described herein will be an excellent additional source of feed nutrients in animal feed formulations, wherein the term “feed nutrient” means nutrients such as proteins, lipids, carbohydrates, vitamins, minerals and nucleic acids that may be derived from the yeast biomass comprising the recombinant production hosts.

[0204] More specifically, for example, Yarrowia lipolytica (ATCC #20362) has the following approximate chemical composition, as a percent relative to the DCW: 35% protein, 40% lipid, 10% carbohydrate, 5% nucleic acids, 5% ash and 5% moisture. Furthermore, within the carbohydrate fraction, β-glucans comprise approximately 45.6 mg/g, mannans comprise approximately 11.4 mg/g, and chitin comprises approximately 52.6 mg/g (while trehalose is a minor component [approximately 0.7 mg/g]).

[0205] A considerable body of literature has examined the immuno-modulating effects of yeast β-glucans, mannans and chitin in both traditional animal husbandry and within the aquacultural sector. The means by which β-glucans, the primary constituents of bacterial and fungal cell walls, stimulate non-specific immunity (i.e., “immunostimulant effects”) to thereby improve health of aquaculture species, pets and farm animals and humans are best studied, although both chitin and mannans are similarly recognized as useful immunostimulants (see Int'l. App. Pub. No. WO 2006/052870 for additional details).

[0206] Based on the unique protein:lipid:carbohydrate composition of Yarrowia lipolytica, as well as the unique complex carbohydrate profile (comprising an approximate 1:4:4.6 ratio of mannan:β-glucans:chitin), it is contemplated that the genetically engineered yeast cells of the present invention (or portions thereof) would be useful additives to animal feed formulations (e.g., as whole [lyophilized] yeast cells, as purified cells walls, as purified yeast carbohydrates or within various other fractionated forms).

[0207] When the biomass and/or stabilized microbial oils of the recombinant production hosts herein comprise an effective amount of C₄₀ carotenoids (preferably lutein, lycopene, β-carotene, canthaxanthin, astaxanthin, and/or zeaxanthin), the biomass and/or oil is suitable as an ingredient in a “pigmented feed product” or “pigmented animal feed”. As used herein, “pigmented” or “pigment” will refer to a material having coloration provided by at least one C₄₀ carotenoid pigment produced from a recombinant oleaginous yeast. Many animals have been reported to acquire tissue pigmentation by absorbing xanthophylls in their feed. The pigmented animal feed may be an animal feed selected from the group consisting of fish feed, crustacea feed, shrimp feed, crab feed, lobster feed, and chicken feed. The nutritional requirements and feed forms for each animal feed are well known in the art (for example, see Nutrient Requirements of Fish, published by the Board of Agriculture's Committee on Animal Nutrition, National Research Council, National Academy: Washington, D.C. 1993; and Nutrient Requirements of Poultry, published by the Board of Agriculture's Committee on Animal Nutrition, National Research Council, National Academy: Washington, D.C. 1994).

[0208] The pigmented feed product is typically a feed pellet formed using one of many techniques known in the art such cold pressed pellets, extruded pellets, and feed pellets wherein the pigmented product is suspended in oil and applied to the feed pellet after the extrusion process (“post-extrusion applied” or PE). In preferred aspects, the pigmentation product is oleaginous yeast biomass comprising stabilized and pigmented microbially-produced oil (additionally comprising ω-3/ω-6 PUFAs), or purified oil isolated from the recombinant oleaginous yeast biomass. The size and shape of the feed pellets may vary according to the target species and developmental stage. The incorporation of the pigmented product post-extrusion can be accomplished using a variety of techniques. Typically, the pigmentation product is mixed with a suitable oil (e.g., vegetable oil, corn oil, sunflower, soybean oil, fish oil) and prior to applying the pigment to the extruded feed pellet. The amount of pigmented biomass product formulated into feed pellets can be adjusted and/or optimized for the particular application. Factors to consider include, but are not limited to: the concentration of the pigment in the biomass, the concentration of the pigment in the pigmentation product, the target species, the age and/or growth rate of the selected species, the type of carotenoid used, the bioabsorption characteristics of the chosen pigment in the context of the species to be pigmented, the feeding schedule, the cost of the pigment, and the palatability of the resulting feed. One of skill in the art can adjust the amount of pigmented biomass incorporated into the feed so that adequate levels of carotenoid are present while balancing the nutritional requirements of the species. Typical concentrations of the carotenoid pigment incorporated into, for example, fish feed range from about 10 to about 200 mg/kg of fish feed, wherein a preferred range is from about 10 mg/kg to about 100 mg/kg, a more preferred range is from about 10 mg/kg to about 80 mg/kg and a most preferred range is from about 20 mg/kg to about 60 mg/kg, depending on the specific product.

[0209] Although numerous commercial products comprising the oleaginous yeasts, the stabilized microbially produced oil thereof, or isolated CoQ₁₀ are contemplated by the Applicants herein, applications of the products are described below in additional detail in reference to various specific animal feeds. Generally, the recombinant oleaginous yeast biomass comprises about 0.1 weight percent (wt %) to about 50 wt % of the animal feed, preferably about 0.5 wt % to about 20 wt %, more preferably about 1 wt % to about 10 wt %, most preferably about 1 wt % to about 5 wt %. These examples are not intended to be limiting.

[0210] Chicken Feed-—Nutritional Requirements: The dietary requirements of poultry are well known (see Nutrient Requirements of Poultry, published by the Board of Agriculture's Committee on Animal Nutrition, National Research Council, National Academy: Washington, D.C. 1994). Typical feeds are comprised of crude protein (including essentially amino acids), carbohydrates, fats/lipids (e.g., ω-3/ω-6 PUFAs), vitamins (i.e., fat and water soluble), minerals (i.e., both macrominerals and trace minerals) and water. Additional feed ingredients may include antioxidants (e.g., CoQ₁₀; typically included to prevent oxidation of lipids and/or pigments), hormones, antibiotics and pigments (i.e., carotenoids), to name of few. The source of the various components is typically chosen based on cost, availability and quality of the nutrients they contain. Typically, components include, but are not limited to: cereal grains (primarily carbohydrates and protein), animal protein meal, animal or vegetable fats/lipids, and isolates from various plants including corn, rice, alfalfa and soybean, to name a few.

[0211] When producing a “poultry pigmentation product”, referring to pigmented feed additives used to color poultry via commercial farming techniques, preferred carotenoids are lutein, canthaxanthin, astaxanthin and/or zeaxanthin. Typically, the poultry is a chicken and the pigmentation product is used to pigment chicken tissue (e.g., skin) and/or egg yolks.

[0212] Crustacea Feed—Nutritional Requirements: The dietary requirements of crustacea are well-known (see “Training Manual on Shrimp and Fish Nutrition and Feed Management”, CIBA Special Bulletin No. 15; Oct. 22-31, 2002; Ali, Amanad, editor; published by the Central Institute of Brackishwater Aquaculture (CIBA), Chennai, India, hereinafter referred to as “Amanad”). Typical feeds are comprised of crude protein (including essentially amino acids), carbohydrates, fats/lipids (e.g., ω-3/ω-6 PUFAs), vitamins (i.e., fat and water soluble), minerals (i.e., both macrominerals and trace minerals) and water. Additional feed ingredients may include antioxidants (e.g., CoQ₁₀; typically included to prevent oxidation of lipids and/or pigments), hormones, antibiotics and pigments (i.e., carotenoids), to name of few. The source of the various components is typically chosen based on cost, availability and quality of the nutrients they contain. Typically, components include, but are not limited to: cereal grains (primarily carbohydrates and protein), animal protein meal (e.g., fish, prawn, squid, and clam meat meal), animal or vegetable fats/lipids, and isolates from various plants including corn, rice, alfalfa, soybean, groundnut cake (i.e., peanuts), sunflower cake, and gingelly (sesame) cake, to name a few. Examples of the moisture, protein, fat, fiber, carbohydrate, and ash content of various raw feed materials typically used in feed is shown in Tables 5 and 6 (see Amanad).

TABLE 5
Composition Of Various Raw Feed Materials Used In Preparing
Shrimp Feed

| | | | | | Car- | |
|---|---|---|---|---|---|---|
| Ingredient | Moisture | Protein | Fat | Fiber | bohydrate | Ash |
| Fish Meal | 10.8 | 55.0 | 5.4 | 1.73 | 3.27 | 23.78 |
| Prawn Head | 9.91 | 39.8 | 9.6 | 16.3 | 4.0 | 20.18 |
| Squid Meal | 8.4 | 66.5 | 4.4 | 3.98 | 5.9 | 10.8 |
| Clam meat meal | 10.1 | 49.9 | 8.66 | — | 28.3 | 7.75 |
| Soybean Meal | 10.45 | 51.5 | 1.00 | 8.85 | 19.7 | 8.5 |
| Groundnut Cake | 13.05 | 46.93 | 5.0 | 8.9 | 18.03 | 8.9 |
| Sunflower Cake | 7.0 | 26.69 | 2.04 | 30.13 | 26.37 | 7.7 |
| Gingelly Cake | 9.76 | 38.71 | 6.00 | 10.96 | 15.8 | 19.02 |

*Note: All values reported as weight percent (wt %) of ingredient.

TABLE 6
Typical Composition Of Feed Formulation For Shrimp

| Ingredient | Starter Feed | Grower Feed | Finishing Feed |
|---|---|---|---|
| Crude protein | 40-45 | 38-40 | 35-38 |
| Lipid | 6-8 | 8-10 | 8-10 |
| Carbohydrate | 10-16 | 15-20 | 20-25 |
| Crude fiber | 1-2 | 1-3 | 2-4 |
| Ash | 10-12 | 10-15 | 12-18 |
| Mineral mix | 2-5 | 2-5 | 2-5 |

*Note: All values reported as weight percent (wt %) of ingredient.

Mixtures comprising these compositions are blended and then pelleted and dried with 16-17% moisture.

[0213] When producing a “crustacean pigmentation product”, referring to pigmented feed additives used to color crustaceans via commercial aquacultural techniques, preferred carotenoids are canthaxanthin and/or astaxanthin. Typically, the crustaceans are shrimp or lobsters and the pigmentation product is used to pigment tissue and shells.

[0214] Fish Feed—Nutritional Requirements: An increased understanding of the nutritional requirements for various fish species and technological advances in feed manufacturing have allowed the development and use of manufactured or artificial diets (formulated feeds) to supplement or to replace natural feeds in the aquaculture industry. The dietary requirements of fish are well known (see Nutrient Requirements of Fish, published by the Board of Agriculture's Committee on Animal Nutrition, National Research Council, National Academy: Washington, D.C. 1993). The dietary requirements of fish feed may vary according to species, aquatic environment, temperature and age. However, the general nutrition requirements for most aquatic species produced via aquaculture are known and are generally comprised of about 25 wt % to about 55 wt % crude protein (including essentially amino acids), up to about 30 wt % lipids (e.g., ω-3/ω-6 PUFAs), vitamins (i.e., fat and water soluble), minerals (i.e., including essential minerals), carbohydrates (sometimes included as an economical energy source although not required) and water (typically about 6-40 wt % depending upon the desired product form). Additional feed ingredients may include: 1) antioxidants (i.e., CoQ₁₀), to prevent oxidation of lipids and/or pigments and to extend product shelf-life; 2) carotenoids, particularly for salmonid and ornamental “aquarium” fishes, to enhance tissue coloration of e.g., muscle, skin, shell, etc.; 3) binding agents, to provide stability to the pellet and reduce leaching of nutrients into the water (e.g., beef heart, starch, cellulose, pectin, gelatin, gum arabic, locust bean, agar, carageenin and other alginates); 4) chemoattractants and flavorings, to enhance feed palatability and its intake; and, 5) other feedstuffs. These other feedstuffs can include such materials as hormones, antibiotics, fiber and ash (for use as a filler and as a source of calcium and phosphorus, respectively), vegetable matter and/or fish or squid meal (e.g., live, frozen or dried algae, brine shrimp, rotifers or other zooplankton) to enhance the nutritional value of the diet and increase its acceptance by the fish.

[0215] When producing a “fish pigmentation product”, referring to pigmented feed additives used to color fish via commercial aqucultural techniques, preferred carotenoids are canthaxanthin and/or astaxanthin. Fish pigmented by absorbing carotenoids include, but are not limited to salmonids, carp (Cyprinus sp.), red sea bream, tilapia, goldfish, Cichlidae, and yellowtail (Serola lalandi). In one aspect, fish pigmented using the present materials are members of the family Salmonidae, whose typical members include salmon, trout and chars.

[0216] The source of the various components is typically chosen based on cost relative to growth performance. Typically, components include but are not limited to: fish meal, fish oil (typically marine fish oil), meat meal, shrimp meal, and isolates from various plants including corn, rice, and soybean, to name a few. In one aspect, the majority of the crude protein and crude lipids in the fish feed is preferably provided by fish meal and fish oil.

[0217] The manufacture of aquafeed formulations requires consideration of a variety of factors, since a complete diet must be nutritionally balanced, palatable, water stable and have the proper size and texture. With regard to nutrient composition of aquafeeds, one is referred to: Handbook on Ingredients for Aquaculture Feeds (Hertrampf, J. W. and F. Piedad-Pascual. Kluwer Academic: Dordrecht, The Netherlands, 2000) and Standard Methods for the Nutrition and Feeding of Farmed Fish and Shrimp (Tacon, A. G. J.

[0218] Argent Laboratories: Redmond, 1990). In general, feeds are formulated to be dry (i.e., final moisture content of 6-10%), semi-moist (i.e., 35-40% water content) or wet (i.e., 50-70% water content). Dry feeds include the following: simple loose mixtures of dry ingredients (i.e., “mash” or “meals”); compressed pellets, crumbles or granules; and flakes. Depending on the feeding requirements of the fish, pellets can be made to sink or float. Semi-moist and wet feeds are made from single or mixed ingredients (e.g., trash fish or cooked legumes) and can be shaped into cakes or balls.

### EXAMPLES

[0219] The present invention is further described in the following Examples, which illustrate reductions to practice of the invention but do not completely define all of its possible variations.

### General Methods

[0220] Standard recombinant DNA and molecular cloning techniques used in the Examples are well known in the art and are described by: 1) Sambrook, J. and Russell, D. Molecular Cloning: A Laboratory Manual; 3^{rd} Ed. Cold Spring Harbor Laboratory: Cold Spring Harbor, N.Y. (2001); 2) T. J. Silhavy, M. L. Bennan, and L. W. Enquist, Experiments with Gene Fusions; Cold Spring Harbor Laboratory: Cold Spring Harbor, N.Y. (1984); and 3) Ausubel, F. M. et al., Current Protocols in Molecular Biology, published by Greene Publishing Assoc. and Wiley-Interscience, Hoboken, N.J. (1987).

[0221] Materials and methods suitable for the maintenance and growth of microbial cultures are well known in the art. Techniques suitable for use in the following examples may be found as set out in Manual of Methods for General Bacteriology (Phillipp Gerhardt, R. G. E. Murray, Ralph N. Costilow, Eugene W. Nester, Willis A. Wood, Noel R. Krieg and G. Briggs Phillips, Eds), American Society for Microbiology: Washington, D.C. (1994)); or by Thomas D. Brock in Biotechnoloyy: A Textbook of Industrial Microbiology, 2^{nd} ed., Sinauer Associates: Sunderland, Mass. (1989). All reagents, restriction enzymes and materials used for the growth and maintenance of microbial cells were obtained from Aldrich Chemicals (Milwaukee, Wis.), DIFCO Laboratories (Detroit, Mich.), GIBCO/BRL (Gaithersburg, Md.), or Sigma Chemical Company (St. Louis, Mo.), unless otherwise specified.

[0222] E. coli (XL1-Blue or XL2-Blue) competent cells were purchased from the Stratagene Company (San Diego, Calif.). E. coli strains were typically grown at 37° C. on Luria Bertani (LB) plates.

[0223] General molecular cloning was performed according to standard methods (Sambrook et al., supra). Oligonucleotides were synthesized by Sigma-Genosys (Spring, Tex.). Individual PCR amplification reactions were carried out in a 50 μl total volume, comprising: PCR buffer (containing 10 mM KCI, 10 mM (NH₄)₂SO₄, 20 mM Tris-HCI (pH 8.75), 2 mM MgSO₄, 0.1% Triton X-100), 100 μg/mL BSA (final concentration), 200 μM each deoxyribonucleotide triphosphate, 10 pmole of each primer and 1 μl of Pfu DNA polymerase (Stratagene, San Diego, Calif.), unless otherwise specified.

[0224] The meaning of abbreviations is as follows: “sec” means second(s), “min” means minute(s), “h” means hour(s), “d” means day(s), “μL” means microliter(s), “mL” means milliliter(s), “L” means liter(s), “μM” means micromolar, “mM” means millimolar, “M” means molar, “mmol” means millimole(s), “μmol” mean micromole(s), “g” means gram(s), “μg” means microgram(s), “ng” means nanogram(s), “U” means unit(s), “bp” means base pair(s), “kB” means kilobase(s), “DCW” means dry cell weight, and “TFAs” means total fatty acids.

[0225] The structure of an expression cassette will be represented by a simple notation system of “X::Y::Z”, wherein X describes the promoter fragment, Y describes the gene fragment, and Z describes the terminator fragment, which are all operably linked to one another.

Cultivation of Yarrowia lipolytica

[0226] Yarrowia lipolytica strain ATCC #20362 was purchased from the American Type Culture Collection (Rockville, Md.). Yarrowia lipolytica strains were routinely grown at 30° C. in several media: minimal media (MM), fermentation media, YPD media and Oil Induction media. Agar plates were prepared as required by addition of 20 g/L agar to each liquid media, according to standard methodology.
[0227] Basic Minimal Media (MM) Recipe (per liter): 20 g glucose; 1.7 g yeast nitrogen base without amino acids; 1.0 g proline; and pH 6.1 (not adjusted).
[0228] Fermentation medium: 6.70 g/L Yeast nitrogen base; 5.00 g/L Yeast extract (BBL); 6.00 g/L KH₂PO₄; 2.00 g/L K₂HPO₄; 1.50 g/L MgSO₄*7H₂O; and 20 g/L Glucose.
[0229] YPD agar medium (per liter): 10 g of yeast extract [Difco], 20 g of Bacto peptone [Difco]; and 20 g of glucose.
[0230] Oil induction (OI) medium: 100 mM Glucose and 50 mM (pH 6.5) Potassium phosphate.
[0231] High Glucose Media (HGM) (per liter): 80 glucose, 2.58 g KH₂PO₄ and 5.36 g K₂HPO₄, pH 7.5 (do not need to adjust).

### Example 1

### DNA Transformation in Yarrowia lipolytica

[0232] The following general procedure was used to make Yarrowia lipolytica chemically competent for DNA transformation (Chen, D. C. et al., Appl. Microbiol. Biotechnol., 48(2):232-235-(1997)).

[0233] Yarrowia cells were streaked onto YPD media plates 1 day prior to transformation. The cells were incubated at 30° C.

[0234] Several large loopfuls (˜3) of cells from the YPD plate were resuspended in 1 mL of transformation media [comprising 2.25 mL 50% PEG (average MW 3350); 0.125 mL 2 M lithium acetate pH 6.0; 0.125 mL 2 M dithiothreitol (DTT; prepared fresh prior to each use); and 50 μL salmon sperm DNA (10 mg/mL)].

[0235] The Yarrowia cells suspended in transformation solution were transferred as 100 μL aliquots into microfuge tubes using a large-bore pipette tip. Approximately 100 to 500 ng (5 μL) of the desired plasmid (in linearized form when transforming integration plasmids) was added and the mixture was incubated at 39° C. for 1 hr with vortexing of the mixture every 15 min. After incubation, approximately 50 μL of the cell mixture were plated on MM agar plates with appropriate selection and incubated at 30° C. for a defined period of time (typically up to 4 days) depending upon the specific plasmid.

[0236] Alternatively, transformants were selected on 5-fluoroorotic acid (“FOA”;

[0237] also 5-fluorouracil-6-carboxylic acid monohydrate) selection media, comprising: 0.17% yeast nitrogen base (DIFCO Laboratories) without ammonium sulfate or amino acids, 2% glucose, 0.1% proline, 75 mg/L uracil, 75 mg/L uridine, 900 mg/L FOA (Zymo Research Corp., Orange, Calif.) and 20 g/L agar.

[0238] Transformants containing self-replicating plasmid were visible within about 2-6 days depending upon the strain. Transformants containing integrative plasmid were typically visible within 3-4 days.

### Example 2

### Coenzyme Q Pathway and Profile in Wildtype Yarrowia lipolytica

[0239] The present Example describes the quantification of CoQ₉ in wildtype Yarrowia lipolytica. Specifically, determination of the amount of CoQ₉ in Yarrowia lipolytica strain ATCC #20362 was made using an Agilent series 1100 HPLC equipped with a DAD detector. The sample was generated by extracting the oil in 3:1 hexane:methanol overnight, partitioning the solvents using a 1 N NaCl solution and stripping the hexane with a Büchi® Rotavapor® (New Castle, Del.).

[0240] Three samples of approximately 15, 38, and 86 mg were added to a 4 mL amber vial. Then, 100 μL of glass beads and 1.0 mL of a previously sparged 1:1 tetrahydrofuran(THF)/methanol (MeOH) solution were added and shaken for 15 min at 200 rpm. The sample was then transferred to a Whatman uni-prep vial and analyzed.

[0241] A 1 mg standard sample of CoQ₉ received from Fluka Chemical Corp. (Milwaukee, Wis.; Catalog #27597, lot #378472) was diluted to 0.1 mg using 1:1 THF/MeOH and analyzed. The standard received was assumed to be exactly 1 mg.

[0242] The HPLC conditions used were as follows: Zorbax SB-C18 4.6×250 mm column, 5 micron; 1.0 mL/min flow rate; 35° C. column temperature; 5 μL injection volume; UV detection at 270 and 450 nm wavelengths.

TABLE 7
HPLC Solvents/Gradients For CoQ₉ Extraction

| | Solvent A: | Solvent B: |
|---|---|---|
| Time (min) | Acetonitrile | Isopropanol |
| 0.0 | 95% | 5% |
| 30.0 | 0% | 100% |
| 35.0 | 0% | 100% |
| 36.0 | 95% | 5% |
| 45.0 | 95% | 5% |

Calculations were performed as follows. Specifically, the standard reference factor was equivalent to the milligrams (mg) of standard/area. The percent (%) sample amount was determined according to the following formula:

standard reference factor*(sample peak area/sample concentration)*100.

The ratio of the sample against the standard was calculated and the sample weight taken into account. The sample used was 26.64 mg and diluted with 1 mL of MeOH/THF that had been sparged of air. This was run against the existing standard of 0.1 mg/mL of CoQ₉. The area counts for the standard were 18.9 at 450 nm and 711 at 270 nm, while for the sample, the area counts were 13 at 450 nm and 569 at 270 nm. Based on these results, the CoQ₉ calculated in the oil was in the range of 0.2 to 0.3%.

### Example 3

### Construction of Yarrowia Expression Plasmid pDMW359

[0243] The present Example describes the generation of pDMW359, comprising a chimeric FBAIN::EgD9e::Pex20-3′ gene, wherein EgD9e refers to a Δ9 elongase enzyme (SEQ ID NO:4) isolated from Euglena gracilis, encoded by SEQ ID NO:3. EgD9e is described in Int'l. App. Pub. No. WO 2007/061742.

[0244] Plasmid pDMW359 was derived from plasmid pZUF17 (FIG. 4A; SEQ ID NO:5; comprising a synthetic Δ17 desaturase gene [“D17st”] derived from Saprolegnia diclina (U.S. Pat. App. Pub. No. 2003/0196217 A1), codon-optimized for expression in Yarrowia lipolytica (U.S. Pat. No. 7,238,482)). Specifically, a NcoI/NotI fragment containing the coding region of the wild type Euglena gracilis Δ9 elongase (EgD9e) was used to replace the NcoI/NotI fragment containing the Δ17 desaturase coding region of pZUF17. The product of this ligation was pDMW359 (FIG. 4B; SEQ ID NO:6), which thereby contained the following components:

TABLE 8
Components of Plasmid pDMW359 (SEQ ID NO: 6)

| RE Sites And | |
|---|---|
| Nucleotides | |
| Within SEQ ID | Description Of Fragment And |
| NO: 6 | Chimeric Gene Components |
| 2134-1254 | ColE1 plasmid origin of replication |
| 3064-2204 | Ampicillin-resistance gene (Amp^{R}) |
| 3963-5267 | Yarrowia autonomous replication sequence (ARS18; |
| | GenBank Accession No. A17608) |
| SalI/PacI | Yarrowia Ura3 gene (GenBank Accession No. |
| 6802-5301 | AJ306421) |
| EcoRI/BsiWI | FBAIN::EgD9e::Pex20, comprising: |
| 6843-1098 | FBAIN: Yarrowia lipolytica FBAIN promoter (U.S. Pat. |
| | No. 7,202,356); |
| | EgD9e: Euglena gracilis Δ9 elongase (labeled as |
| | “EgD9E WT” in Figure) (SEQ ID NO: 3; Int'l. App. |
| | Pub. No. WO 2007/061742); |
| | Pex20: Pex20 terminator sequence from Yarrowia Pex20 |
| | gene (GenBank Accession No. AF054613) |

### Example 4

### Construction of Codon-Optimized ddsA Genes for Expression in Yarrowia lipolytica

[0245] Decaprenyl diphosphate synthase, encoded by the ddsA gene, is required for CoQ₁₀ biosynthesis. Various prenyl diphosphate synthases have been identified in publicly available literature, based on homology to the well characterized Gluconobacter oxydans ddsA gene described by Okada, K., et al. (GenBank® Accession No. BAA32241; Eur. J. Biochem., 255(1):52-59 (1998)) and typical signature sequences of prenyl diphosphate synthases (Okada, K., et al., J. Bacteriol., 179:5992-5998 (1997)). Despite sharing at least 47% sequence identity with the Gluconobacter oxydans ddsA, few of the proteins summarized below in Table 9 have been heterologously expressed to confirm their putative annotation.

TABLE 9
Publicly Described Prenyl Diphosphate Synthases

| GenBank ® | | SEQ |
|---|---|---|
| Accession | | ID |
| Number | GenBank ® Description | NO |
| BAA32241 | Gluconobacter oxydans decaprenyl diphosphate | 7 |
| | synthase | |
| EAP81866 | Sulfitobacter sp. NAS-14.1 decaprenyl diphosphate | 8 |
| | synthase | |
| AAV93637 | Silicibacter pomeroyi DSS-3 decaprenyl | 9 |
| | diphosphate synthase | |
| EAQ04419 | Oceanicola batsensis HTCC2597 decaprenyl | 10 |
| | diphosphate synthase | |
| CAK06434 | Rhizobium leguminosarum bv. viciae 3841 putative | 11 |
| | octaprenyl-diphosphate synthase | |
| BAB53531 | Mesorhizobium loti MAFF303099 octaprenyl- | 12 |
| | diphosphate synthase | |
| AAL41650 | Agrobacterium tumefaciens str. C58 octaprenyl- | 13 |
| | diphosphate synthase | |
| EAQ24568 | Roseovarius sp. 217 Geranylgeranyl pyrophosphate | 14 |
| | synthase/Polyprenyl synthetase | |
| ABD89877 | Rhodopseudomonas palustris BisB18 | 15 |
| | Farnesyltranstransferase | |

[0246] Any of the proteins listed above in Table 9 could be used for expression in Yarrowia lipolytica, to enable synthesis of CoQ₁₀. More specifically, in order to express the heterologous ddsA gene in Yarrowia in the most efficient manner, each gene was synthesized according to the codon usage preference of Yarrowia lipolytica (U.S. Pat. No. 7,125,672). Thus, according to the Yarrowia codon usage pattern, the consensus sequence around the ATG translation initiation codon, and the general rules of RNA stability (Guhaniyogi, G. and J. Brewer, Gene, 265(1-2):11-23 (2001)), codon-optimized ddsA genes were designed, based on each of the sequences presented above as SEQ ID NOs:7-15 and their corresponding nucleotide sequence. In addition, a mitichondria target sequence (e.g., the first 47 to 50 amino acids from the Yarrowia ppt1 gene encoding p-hydroxybenzoate:polyprenyl transferase [GenBank Accession No. XP_{—}505040; SEQ ID NO:16) was placed in the front of these bacterial genes to create a fusion protein. The synthetic ddsA fusion gene was designed to contain a NcoI site at the 5′ end and a NotI site at the 3′ end. These DNA fragments were then cloned into the corresponding sites in self-replicating plasmid pDMW359 with a FBAIN promoter and the Pex20-3′ terminator (from Example 3).

[0247] Based on the above methodology, the following plasmids (Table 10) were constructed, each comprising a chimeric FBAIN::synthetic fusion ppt1-ddsA::Pex20 gene construct, wherein the synthetic ddsA was codon-optimized for expression in Yarrowia lipolytica. None of the modifications in the codon-optimized gene changed the amino acid sequence of the encoded protein (i.e., as set forth in SEQ ID NOs:7-15, respectively). The designed fusion ppt1-ddsA genes were synthesized by GenScript Corporation (Piscataway, N.J.) and individually cloned into intermediary vector pUC57 (GenBank Accession No. Y14837), prior to cloning into pDMW359 using standard methodology.

TABLE 10
Plasmids Comprising Codon-Optimized Prenyl Diphosphate
Synthase Genes For Expression In Yarrowia lipolytica

| | | | Fusion |
|---|---|---|---|
| | Plasmid | | SEQ |
| Plasmid | SEQ ID | | ID |
| Name | NO | Synthetic Fusion | NOs |
| — | — | Fusion of GenBank Accession No. XP_505040 (N- | 17, 18 |
| | | terminus of Yarrowia lipolytica ppt1) and | |
| | | GenBank ® Accession No. BAA32241 | |
| | | (Gluconobacter oxydans ddsA), codon-optimized | |
| | | for expression in Yarrowia lipolytica | |
| pDMW359- | 19 | Fusion of GenBank Accession No. XP_505040 (N- | 20, 21 |
| Ss_ddsA | | terminus of Yarrowia lipolytica ppt1) and | |
| | | GenBank ® Accession No. EAP81866 (Sulfitobacter | |
| | | sp. ddsA), codon-optimized for expression in | |
| | | Yarrowia lipolytica | |
| pDMW359- | 22 | Fusion of GenBank Accession No. XP_505040 (N- | 23, 24 |
| Sp_ddsA | | terminus of Yarrowia lipolytica ppt1) and | |
| | | GenBank ® Accession No. AAV93637 (Silicibacter | |
| | | pomeroyi ddsA), codon-optimized for expression in | |
| | | Yarrowia lipolytica | |
| pDMW359- | 25 | Fusion of GenBank Accession No. XP_505040 (N- | 26, 27 |
| Ob_ddsA | | terminus of Yarrowia lipolytica ppt1) and | |
| | | GenBank ® Accession No. EAQ04419 (Oceanicola | |
| | | batsensis ddsA), codon-optimized for expression in | |
| | | Yarrowia lipolytica | |
| pDMW359- | 28 | Fusion of GenBank Accession No. XP_505040 (N- | 29, 30 |
| RI_ddsA | | terminus of Yarrowia lipolytica ppt1) and | |
| | | GenBank ® Accession No. CAK06434 (Rhizobium | |
| | | leguminosarum ddsA), codon-optimized for | |
| | | expression in Yarrowia lipolytica | |
| pDMW359- | 31 | Fusion of GenBank Accession No. XP_505040 (N- | 32, 33 |
| MI_ddsA | | terminus of Yarrowia lipolytica ppt1) and | |
| | | GenBank ® Accession No. BAB53531 | |
| | | (Mesorhizobium loti ddsA), codon-optimized for | |
| | | expression in Yarrowia lipolytica | |
| pDMW359- | 34 | Fusion of GenBank Accession No. XP_505040 (N- | 35, 36 |
| At_ddsA | | terminus of Yarrowia lipolytica ppt1) and | |
| | | GenBank ® Accession No. AAL41650 | |
| | | (Agrobacterium tumefaciens str. C58 ddsA), codon- | |
| | | optimized for expression in Yarrowia lipolytica | |
| pDMW359- | 37 | Fusion of GenBank Accession No. XP_505040 (N- | 38, 39 |
| Rs_ddsA | | terminus of Yarrowia lipolytica ppt1) and | |
| | | GenBank ® Accession No. EAQ24568 | |
| | | (Roseovarius sp. ddsA), codon-optimized for | |
| | | expression in Yarrowia lipolytica | |
| pDMW359- | 40 | Fusion of GenBank Accession No. XP_505040 (N- | 41, 42 |
| Rp_ddsA | | terminus of Yarrowia lipolytica ppt1) and | |
| | | GenBank ® Accession No. ABD89877 | |
| | | (Rhodopseudomonas palustris ddsA), codon- | |
| | | optimized for expression in Yarrowia lipolytica | |

### Example 5

### Construction of Various Yarrowia lipolytica Strains Producing ω-3/ω-6 PUFAs

[0248] The present Example describes various strains of Yarrowia lipolytica that have been engineered to produce ω-3/ω-6 polyunsaturated fatty acids [“PUFAs”]. It is contemplated that any of these Y. lipolytica host strains could be engineered to co-produce CoQ₁₀ and ω-3/ω-6 PUFAs, if a ddsA gene was simultaneously expressed (as described in Example 6, infra).

[0249] More specifically, a variety of Yarrowia lipolytica strains have been engineered by the Applicant's Assignee to produce high concentrations of various ω-3/ω-6 PUFAs. Since naturally produced PUFAs are limited to 18:2 fatty acids in this organism, all of the genetically engineered strains have been transformed to express various PUFA biosynthetic pathway genes (i.e., desaturases and elongases) of the Δ6 desaturase/Δ6 elongase PUFA pathway or the Δ9 elongase/Δ8 desaturase PUFA pathway.

Summary of Representative Yarrowia lipolytica Strains Producing ω-3/ω-6 PUFAs

[0250] Although some representative strains are summarized in the Table below, the disclosure of Yarrowia lipolytica strains producing ω-3/ω-6 PUFAs is not limited in any way to the strains therein. Instead, all of the teachings provided in the following commonly owned and co-pending applications, are useful for development of a suitable Yarrowia lipolytica strain engineered to produce ω-3/ω-6 PUFAs. These specifically include the following Applicants' Assignee's co-pending patents and applications: U.S. Pat. No. 7,125,672, U.S. Pat. No. 7,189,559, U.S. Pat. No. 7,192,762, U.S. Pat. No. 7,198,937, U.S. Pat. No. 7,202,356, U.S. Pat. No. 7,214,491, U.S. Pat. No. 7,238,482, U.S. Pat. No. 7,256,033, U.S. Pat. No. 7,259,255, U.S. Pat. No. 7,264,949, U.S. Pat. No. 7,267,976, U.S. Pat. No. 7,273,746, U.S. patent application Ser. No. 10/985,254 and Ser. No. 10/985,691 (filed Nov. 10, 2004), U.S. patent application Ser. No. 11/183,664 (filed Jul. 18, 2005), U.S. patent application Ser. No. 11/185,301 (filed Jul. 20, 2005), U.S. patent application Ser. No. 11/190,750 (filed Jul. 27, 2005), U.S. patent application Ser. No. 11/198,975 (filed Aug. 8, 2005), U.S. patent application Ser. No. 11/253,882 (filed Oct. 19, 2005), U.S. patent application Ser. No. 11/264,784 and Ser. No. 11/264,737 (filed Nov. 1, 2005), U.S. patent application Ser. No. 11/265,761 (filed Nov. 2, 2005), U.S. patent application Ser. No. 11/601,563 and Ser. No. 11/601,564 (filed Nov. 16, 2006), U.S. patent applicaton Ser. No. 11/635,258 (filed Dec. 7, 2006), U.S. patent applicaton Ser. No. 11/613,420 (filed Dec. 20, 2006), U.S. patent applicaton Ser. No. 11/787,772 (filed Apr. 18, 2007), U.S. patent application Ser. No. 11/737,772 (filed Apr. 20, 2007), U.S. patent application Ser. No. 11/740,298 (filed Apr. 26, 2007), U.S. patent application Ser. No. 12/111,237 (filed Apr. 29, 2008), U.S. patent applicaton Ser. No. 11/748,629 and Ser. No. 11/748,637 (filed May 15, 2007), U.S. patent application Ser. No. 11/779,915 (filed Jul. 19, 2007), U.S. Pat. App. No. 60/991,266 (filed Nov. 30, 2007), U.S. patent application Ser. No. 11/952,243 (filed Dec. 7, 2007), U.S. Pat. App. No. 61/041,716 (filed Apr. 2, 2008), U.S. patent applicaton Ser. No. 12/061,738 (filed Apr. 3, 2008), U.S. patent application Ser. No. 12/099,811 (filed Apr. 9, 2008), U.S. patent application Ser. No. 12/102,879 (filed Apr. 15, 2008), U.S. patent application Ser. No. 12/111,237 (filed Apr. 29, 2008), U.S. Pat. App. No. 61/055,511 (filed May 23, 2008), U.S. Pat. App. No. 61/085,482 (filed Aug. 1, 2008), U.S. Pat. App. No. 61/093,007 (filed Aug. 29, 2008), U.S. Pat. App. No. 61/098333 (filed Sep. 19, 2008), U.S. patent applicaton Ser. No. 12/244,822 (filed Oct. 3, 2008) and U.S. patent application Ser. No. 12/244,950 (filed Oct. 3, 2008).

TABLE 11
Lipid Profile Of Representative Yarrowia lipolytica Strains Engineered To
Produce ω-3/ω-6 PUFAs

| | | ATCC | Fatty Acid Content | | | | | |
|---|---|---|---|---|---|---|---|---|
| | | Deposit | (As A Percent [%] of Total Fatty Acids) | | | | | |
| Strain | Reference | No. | 16:0 | 16:1 | 18:0 | 18:1 | 18:2 | (ALA) |
| Wildtype | US 2006-0035351- | #76982 | 14 | 11 | 3.5 | 34.8 | 31 | — |
| pDMW208 | A1; WO2006/033723 | — | 11.9 | 8.6 | 1.5 | 24.4 | 17.8 | — |
| pDMW208D62 | | — | 16.2 | 1.5 | 0.1 | 17.8 | 22.2 | — |
| M4 | US 2006-0115881- | — | 15 | 4 | 2 | 5 | 27 | — |
| | A1; WO2006/052870 | | | | | | | |
| Y2034 | US 2006-0094092- | — | 13.1 | 8.1 | 1.7 | 7.4 | 14.8 | — |
| Y2047 | A1; WO2006/055322 | PTA-7186 | 15.9 | 6.6 | 0.7 | 8.9 | 16.6 | — |
| Y2214 | | — | 7.9 | 15.3 | 0 | 13.7 | 37.5 | — |
| EU | US 2006-0115881- | — | 19 | 10.3 | 2.3 | 15.8 | 12 | — |
| Y2072 | A1; WO2006/052870 | — | 7.6 | 4.1 | 2.2 | 16.8 | 13.9 | — |
| Y2102 | | — | 9 | 3 | 3.5 | 5.6 | 18.6 | — |
| Y2088 | | — | 17 | 4.5 | 3 | 2.5 | 10 | — |
| Y2089 | | — | 7.9 | 3.4 | 2.5 | 9.9 | 14.3 | — |
| Y2095 | | — | 13 | 0 | 2.6 | 5.1 | 16 | — |
| Y2090 | | — | 6 | 1 | 6.1 | 7.7 | 12.6 | — |
| Y2096 | | PTA-7184 | 8.1 | 1 | 6.3 | 8.5 | 11.5 | — |
| Y2201 | | PTA-7185 | 11 | 16.1 | 0.7 | 18.4 | 27 | — |
| Y3000 | US 2006-0110806- | PTA-7187 | 5.9 | 1.2 | 5.5 | 7.7 | 11.7 | — |
| | A1; WO2006/052871 | | | | | | | |
| Y4001 | WO2008/073367 | — | 4.3 | 4.4 | 3.9 | 35.9 | 23 | 0 |
| Y4036 | | — | 7.7 | 3.6 | 1.1 | 14.2 | 32.6 | 0 |
| Y4070 | | — | 8 | 5.3 | 3.5 | 14.6 | 42.1 | 0 |
| Y4158 | | — | 3.2 | 1.2 | 2.7 | 14.5 | 30.4 | 5.3 |
| Y4184 | | — | 3.1 | 1.5 | 1.8 | 8.7 | 31.5 | 4.9 |

| | Fatty Acid Content (As A Percent [%] of Total Fatty Acids) | | | | | | | | Lipid % |
|---|---|---|---|---|---|---|---|---|---|
| Strain | GLA | 20:2 | DGLA | ARA | ETA | EPA | DPA | DHA | dcw |
| Wildtype | 0 | — | — | — | — | — | — | — | — |
| pDMW208 | 25.9 | — | — | — | — | — | — | — | — |
| pDMW208D62 | 34 | — | — | — | — | — | — | — | — |
| M4 | 35 | — | 8 | 0 | 0 | 0 | — | — | — |
| Y2034 | 25.2 | — | 8.3 | 11.2 | — | — | — | — | — |
| Y2047 | 29.7 | — | 0 | 10.9 | — | — | — | — | — |
| Y2214 | 0 | — | 7.9 | 14 | — | — | — | — | — |
| EU | 18.7 | — | 5.7 | 0.2 | 3 | 10.3 | — | — | 36 |
| Y2072 | 27.8 | — | 3.7 | 1.7 | 2.2 | 15 | — | — | — |
| Y2102 | 29.6 | — | 3.8 | 2.8 | 2.3 | 18.4 | — | — | — |
| Y2088 | 20 | — | 3 | 2.8 | 1.7 | 20 | — | — | — |
| Y2089 | 37.5 | — | 2.5 | 1.8 | 1.6 | 17.6 | — | — | — |
| Y2095 | 29.1 | — | 3.1 | 1.9 | 2.7 | 19.3 | — | — | — |
| Y2090 | 26.4 | — | 6.7 | 2.4 | 3.6 | 26.6 | — | — | 22.9 |
| Y2096 | 25 | — | 5.8 | 2.1 | 2.5 | 28.1 | — | — | 20.8 |
| Y2201 | — | 3.3 | 3.3 | 1 | 3.8 | 9 | — | — | — |
| Y3000 | 30.1 | — | 2.6 | 1.2 | 1.2 | 4.7 | 18.3 | 5.6 | — |
| Y4001 | — | 23.8 | 0 | 0 | 0 | — | — | — | |
| Y4036 | — | 15.6 | 18.2 | 0 | 0 | — | — | — | |
| Y4070 | — | 6.7 | 2.4 | 11.9 | — | — | — | — | |
| Y4158 | — | 6.2 | 3.1 | 0.3 | 3.4 | 20.5 | — | — | 27.3 |
| Y4184 | — | 5.6 | 2.9 | 0.6 | 2.4 | 28.9 | — | — | 23.9 |

[0251] For fatty acid analysis, Yarrowia lipolytica cells were collected by centrifugation and lipids are extracted as described in Bligh, E. G. & Dyer, W. J. (Can. J. Biochem. Physiol., 37:911-917 (1959)). Fatty acid methyl esters [“FAMES”] were prepared by transesterification of the lipid extract with sodium methoxide (Roughan, G., and Nishida I., Arch. Biochem. Biophys., 276(1):38-46 (1990)) and subsequently analyzed with a Hewlett-Packard 6890 GC fitted with a 30-m×0.25 mm (i.d.) HP-INNOWAX (Hewlett-Packard) column. The oven temperature was from 170° C. (25 min hold) to 185° C. at 3.5° C./min.

[0252] For direct base transesterification, Yarrowia culture (3 mL) was harvested, washed once in distilled water, and dried under vacuum in a Speed-Vac for 5-10 min. Sodium methoxide (100 μl of 1%) was added to the sample, and then the sample was vortexed and rocked for 20 min. After adding 3 drops of 1 M NaCl and 400 μl hexane, the sample was vortexed and spun. The upper layer was removed and analyzed by GC as described above.

### Generation of Y4184U4 Strain to Produce EPA

[0253] Y. lipolytica strain Y4184U4 was used as the host in Example 6, infra, and its construction is diagrammed in FIG. 5.

[0254] Strain Y4184U4 was derived from Y. lipolytica ATCC #20362, and is capable of producing EPA via expression of a Δ9 elongase/Δ8 desaturase pathway. The strain has a Ura-phenotype and its construction is described in Example 7 of Int'l. App. Pub. No. WO 2008/073367, hereby incorporated herein by reference.

[0255] The final genotype of strain Y4184 (producing 31% EPA of total lipids) with respect to wildtype Yarrowia lipolytica ATCC #20362 was unknown 1-, unknown 2-, unknown 4-, unknown 5-, unknown 6-, unknown 7-, YAT1::ME3S::Pex16, EXP1::ME3S::Pex20 (2 copies), GPAT::EgD9e::Lip2, FBAINm::EgD9eS::Lip2, EXP1::EgD9eS::Lip1, FBA::EgD9eS::Pex20, YAT1::EgD9eS::Lip2, GPD::EgD9eS::Lip2, GPDIN::EgD8M::Lip1, YAT1::EgD8M::Aco, EXP1::EgD8M::Pex16, FBAINm::EgD8M::Pex20, FBAIN::EgD8M::Lip1 (2 copies), GPM/FBAIN::FmD12S::Oct, EXP1::FmD12S::Aco, YAT1::FmD12::Oct, GPD::FmD12::Pex20, EXP1::EgD5S::Pex20, YAT1::EgD5S::Aco, YAT1::Rd5S::Oct, FBAIN::EgD5::Aco, FBAINm::PaD17::Aco, EXP1::PaD17::Pex16, YAT1::PaD17S::Lip1, YAT1::YICPT1::Aco, GPD::YICPT1::Aco (wherein FmD12 is a Fusarium moniliforme Δ12 desaturase gene [Int'l. App. Pub. No. WO 2005/047485]; FmD12S is a codon-optimized Δ12 desaturase gene, derived from Fusarium moniliforme [Int'l. App. Pub. No. WO 2005/047485]; ME3S is a codon-optimized C_{16/18} elongase gene, derived from Mortierella alpina [Int'l. App. Pub. No. WO 2007/046817]; EgD9e is a Euglena gracilis Δ9 elongase gene [Int'l. App. Pub. No. WO 2007/061742]; EgD9eS is a codon-optimized Δ9 elongase gene, derived from Euglena gracilis [Int'l. App. Pub. No. WO 2007/061742]; EgD8M is a synthetic mutant Δ8 desaturase [Int'l. App. Pub. No. WO 2008/073271], derived from Euglena gracilis [U.S. Pat. No. 7,256,033]; EgD5 is a Euglena gracilis Δ5 desaturase [U.S. Pat. App. Pub. US 2007-0292924-A1]; EgD5S is a codon-optimized Δ5 desaturase gene, derived from Euglena gracilis [U.S. Pat. App. Pub. No. 2007-0292924]; RD5S is a codon-optimized Δ5 desaturase, derived from Peridinium sp. CCMP626 [U.S. Pat. App. Pub. No. 2007-0271632]; PaD17 is a Pythium aphanidermatum Δ17 desaturase [Int'l. App. Pub. No. WO 2008/054565]; PaD17S is a codon-optimized Δ17 desaturase, derived from Pythium aphanidermatum [Int'l. App. Pub. No. WO 2008/054565]; and, YICPT1 is a Yarrowia lipolytica diacylglycerol cholinephosphotransferase gene [Int'l. App. Pub. No. WO 2006/052870]).

[0256] In order to disrupt the Ura3 gene in strain Y4184, construct pZKUE3S (described in Table 22 of Int'l. App. Pub. No. WO 2008/073367 and set forth therein as SEQ ID NO:78, hereby incorporated herein by reference) was used to integrate an EXP1::ME3S::Pex20 chimeric gene into the Ura3 gene of strain Y4184 to result in strains Y4184U1 (11.2% EPA of total lipids), Y4184U2 (10.6% EPA of total lipids) and Y4184U4 (15.5% EPA of total lipids), respectively (collectively, Y4184U).

### Example 6

### Production of CoQ₁₀ in Yarrowia lipolytica Strains Co-Producing ω-3/ω-6 PUFAs

[0257] The present Example describes co-production of CoQ₁₀ and ω-3/ω-6 polyunsaturated fatty acids [“PUFAs”]. This was accomplished via expression of various ddsA genes in Yarrowia lipolytica strain Y4184U4 (Example 5).

[0258] Although the present Example is useful for purposes of demonstration, one skilled in the art will realize that any of the Yarrowia lipolytica strains listed in Example 5 (or constructed using the teachings of the cited commonly owned and co-pending applications) could be used as the host cell for transformation with an integration or expression vector comprising a chimeric ddsA gene, as described above in Example 5, and using the methodology for transformation described in Example 1. CoQ₁₀ would be extracted and quantified.

Transformation of Plasmids Comprising Synthetic ddsA Constructs Into Y4184U4

[0259] Plasmids pDMW359-Ss_ddsA, pDMW359-Sp_ddsA, pDMW359-Ob_ddsA, pDMW359-RI_ddsA, pDMW359-MI_ddsA, pDMW359-At_ddsA and pDMW359-Rs_ddsA (Example 4) were each individually transformed into strain Y4184U4 (Example 5), as described in Example 1. After transformation, the cells were plated onto MM plates without uracil supplementation.

### Characterization of CoQ₁₀ and ω-3/ω-6 PUFA Production in Transformants

[0260] Strains containing expression plasmids pDMW359-Ss_ddsA, pDMW359-Sp_ddsA, pDMW359-Ob_ddsA, pDMW359-RI_ddsA, pDMW359-MI_ddsA, pDMW359-At_ddsA and pDMW359-Rs_ddsA were re-streaked onto MM plates, and then inoculated into liquid MM at 30° C. and shaken at 250 rpm/min for 2 days. The cells were collected by centrifugation, resuspended in HGM and then shaken at 250 rpm/min for 5 days. The cells were collected by centrifugation, lipids were extracted, and FAMEs were prepared by trans-esterification, and subsequently analyzed with a Hewlett-Packard 6890 GC, as described in Example 5.

[0261] As shown in Table 12, ω-3/ω-6 PUFAs were produced in the transformant strains. Total lipid content [“TFAs % DCW”] and concentration of a given fatty acid(s) expressed as a weight percent (wt. %) of total fatty acids [“% TFAs”] are provided; fatty acids are identified as 16:0 (palmitate), 16:1 (palmitoleic acid), 18:0 (stearic acid), 18:1 (oleic acid), 18:2 (LA), ALA, EDA, DGLA, ARA, ETrA, ETA, EPA and “other”. ω-3/ω-6 PUFAs include LA, ALA, EDA, DGLA, ARA, ETrA, ETA and EPA and account for at least 69% of the TFAs.

TABLE 12
Lipid Composition In Yarrowia lipolytica Strain Y4184U4 Transformed With Various ddsA Plasmids

| | | % TFAs | | | | | | | | | | | | |
|---|---|---|---|---|---|---|---|---|---|---|---|---|---|---|
| | | | | | | | 18:3 | | 20:3 | | | 20:4 | | |
| | TFAs % | | | | | | (n-3) | 20:2 | (n-6) | 20:4 | | (n-3) | 20:5 | |
| Plasmid | DCW | 16:0 | 16:1 | 18:0 | 18:1 | 18:2 | ALA | EDA | DGLA | ARA | EtrA | ETA | EPA | other |
| pDMW359- | 23 | 3.5 | 1.6 | 2.0 | 8.1 | 30.8 | 4.2 | 5.1 | 1.2 | 0.6 | 1.5 | 1.3 | 24.6 | 15.4 |
| Ss_ddsA | | | | | | | | | | | | | | |
| pDMW359- | 25 | 4.0 | 1.7 | 2.1 | 7.7 | 32.2 | 3.8 | 5.0 | 1.3 | 0.7 | 1.4 | 1.4 | 27.4 | 11.2 |
| Sp_ddsA | | | | | | | | | | | | | | |
| pDMW359- | 16 | 4.4 | 1.9 | 2.1 | 8.2 | 33.0 | 4.0 | 5.2 | 1.3 | 0.8 | 1.4 | 1.3 | 26.6 | 9.7 |
| Ob_ddsA | | | | | | | | | | | | | | |
| pDMW359- | 26 | 3.9 | 1.6 | 2.1 | 7.7 | 32.8 | 3.8 | 4.9 | 1.3 | 0.7 | 1.4 | 1.4 | 26.6 | 11.9 |
| Rl_ddsA | | | | | | | | | | | | | | |
| pDMW359- | 19 | 4.4 | 1.9 | 2.1 | 7.8 | 32.4 | 3.6 | 5.2 | 1.3 | 0.8 | 1.5 | 1.5 | 26.8 | 10.8 |
| Ml_ddsA | | | | | | | | | | | | | | |
| pDMW359- | 23 | 4.2 | 1.9 | 2.1 | 8.1 | 32.0 | 3.8 | 5.2 | 1.3 | 0.7 | 1.5 | 1.5 | 26.5 | 11.0 |
| At_ddsA | | | | | | | | | | | | | | |
| pDMW359- | 21 | 4.4 | 2.0 | 2.1 | 8.2 | 31.9 | 3.8 | 5.3 | 1.3 | 0.8 | 1.5 | 1.5 | 26.1 | 11.2 |
| Rs_ddsA | | | | | | | | | | | | | | |

[0262] To analyze the presence of CoQ₁₀, colonies were inoculated into flasks containing fermentation medium supplemented with 5% glucose. After 2 days of growth, the CoQ₁₀ was extracted and quantified via HPLC. The extraction protocol was based on the previously described procedure of Zahiri, H. S. et al. (Metab. Eng., 8(5):406-16 (2006)). Specifically, a 1 mL sample of each culture was centrifuged at 14,000 rpm for 15 sec using a bench-top centrifuge. The cell pellets were re-suspended in 400 μl of Solution I (Zymoprep II Yeast Plasmid Mini-prep Kit, Zymo Research, Orange, Calif.; Catalog #D2004) and incubated at 37° C. After 60 min, about 40 μl of 0.5 mm glass beads was added to the suspensions. The tubes were shaken with a bead beater for 5 min at the highest setting. CoQ₁₀was extracted from the cell lysate with 900 μl of a hexane/propanol (5:3) mixture and then with 500 μl of hexane. Following each extraction, the hexane organic phase containing CoQ₁₀ was separated from the aqueous phase by centrifugation at 14,000 rpm and collected into a new tube. The hexane extract was evaporated to dryness under a stream of N₂ at room temperature. The pellets were first dissolved in 200 μl of chloroform (Sigma), then with 1800 μl of ethanol:methanol (7:3).

[0263] An aliquot of 10 μl was injected into a HPLC (Shimadzu 10A system) equipped with a Symmetry® C18 column (Waters Corp., Milford, Mass.). The chromatography was operated at room temperature using an isocratic solvent mixture of ethanol and methanol (70:30 v/v, Fisher Scientific, HPLC grade) as a mobile phase at a flow rate of 1 mL/min. A UV detector was used at 275 nm for the detection and quantification of CoQ₁₀. Authentic standards, CoQ₉ and CoQ₁₀ (Sigma), were used to distinguish the corresponding peaks in the HPLC chromatograms of the experimental samples. All the samples showed the presence of the CoQ₁₀ peak. In addition, the mass of these peaks were confirmed to be that of CoQ₁₀ by mass spectrometry.

[0264] The above results demonstrated that ω-3/ω-6 PUFAs and CoQ₁₀ were co-produced in Yarrowia lipolytica strain Y4184U4.

### Example 7

### Construction of Various Yarrowia lipolytica Strains Producing C₄₀ Carotenoids

[0265] The present Example describes various strains of Yarrowia lipolytica that have been engineered to produce C₄₀ carotenoids. More specifically, a variety of Y. lipolytica strains have been engineered by the Applicant's Assignee to produce various C₄₀ carotenoids. Since the organism does not natively produce C₄₀ carotenoids, all of the genetically engineered strains have been transformed to express various C₄₀ carotenoid biosynthetic pathway genes (i.e., crtE, crtB, crtI, crtY, crtW and crtZ).

Summary of Representative Yarrowia lipolytica Strains Producing C₄₀ Carotenoids

[0266] Although some representative strains are summarized in the Table below, the disclosure of Y. lipolytica strains producing C₄₀ carotenoids is not limited to the strains therein. Instead, the teachings provided in the present Application, in addition to commonly owned and co-pending U.S. patent application Ser. No. 11/952,243, are useful for development of a suitable Y. lipolytica strain engineered to produce C₄₀ carotenoids.

TABLE 13
Carotenoid Profile Of Representative Yarrowia lipolytica Strains
Engineered To Produce C₄₀ Carotenoids

| | | Carotenoid | |
|---|---|---|---|
| Strain(s) | Reference | Produced | Quantification |
| Yarrowia lipolytica | Example 2 of Int'l. | lycopene | — |
| strain YL5 | App. Pub. No. WO | | |
| | 2008/073367 | | |
| Yarrowia lipolytica | Example 3 of Int'l. | lycopene | — |
| strains YCS1001- | App. Pub. No. WO | | |
| YSC1026 | 2008/073367 | | |
| YCS1200 series | Example 5 of Int'l. | β-carotene | e.g., strain YCS1201 |
| of carotenoid- | App. Pub. No. WO | | produced 15% |
| producing Y. lipolytica | 2008/073367 | | lycopene, 72% β- |
| transformants | | | carotene, 5% |
| | | | zeaxanthin |
| YCS1300 series | Example 5 of Int'l. | β-carotene | e.g., strain YCS1302 |
| of carotenoid- | App. Pub. No. WO | | produced 40% |
| producing Y. lipolytica | 2008/073367 | | lycopene, 53% β- |
| transformants | | | carotene |
| YCS3700 series | Example 6 of Int'l. | zeaxanthin | e.g., strain YCS3701 |
| of carotenoid- | App. Pub. No. WO | | produced 6% |
| producing Y. lipolytica | 2008/073367 | | zeaxanthin; YCS3702 |
| transformants | | | produced 4% |
| | | | zeaxanthin |
| YCS4000 series | Example 6 of Int'l. | canthaxanthin | e.g., strain YCS4002 |
| of carotenoid- | App. Pub. No. WO | | produced 5% |
| producing Y. lipolytica | 2008/073367 | | canthaxanthin |
| transformants | | | |
| YCS4100 series | Example 6 of Int'l. | zeaxanthin | e.g., strain YCS4101 |
| of carotenoid- | App. Pub. No. WO | | produced 6% zeaxanthin |
| producing Y. lipolytica | 2008/073367 | | |
| transformants | | | |

### Example 8 (Prophetic)

### Production of CoQ₁₀ in Yarrowia lipolytica Strains Co-Producing C₄₀ Carotenoids and ω-3/ω-6 PUFAs

[0267] Any Y. lipolytica strains producing ω-3/ω-6 PUFAs, as described in Example 5, maybe engineered to also co-produce CoQ₁₀ and C₄₀ carotenoids.

[0268] Specifically, Yarrowia lipolytica strains engineered to produce high concentrations of various ω-3/ω-6 PUFAs could be transformed with e.g., integration vector pYCRTEBI (described in Example 2 of Int'l. App. Pub. No. WO 2008/073367, and set forth therein as SEQ ID NO:12) and optionally integration vector pYPS108 (described in Example 5 of Int'l. App. Pub. No. WO 2008/073367, and set forth therein as SEQ ID NO:36) and optionally integration vector pYPS127 (described in Example 6 of Int'l. App. Pub. No. WO 2008/073367, and set forth therein as SEQ ID NO:43) and/or pYPS128 (described in Example 6 of Int'l. App. Pub. No. WO 2008/073367, and set forth therein as SEQ ID NO:44) to produce a strain co-producing ω-3/ω-6 PUFAs and C₄₀ carotenoids. Subsequently, the resulting transformant cells could be used as host for transformation with an integration or expression vector comprising a chimeric ddsA gene, as described herein, to thereby enable co-production of CoQ₁₀, ω-3/ω-6 PUFAs, and C₄₀ carotenoids.

The application's sequence listing, which the Patent Office published only in electronic form, follows.

SEQUENCE LISTING (117 sequences)

SEQ ID NO: 1 - DNA, 2987 bp, Yarrowia lipolytica
  misc_feature: mutant acetohydroxyacid synthase (AHAS) with W497L mutation
  ref <302>: TITLE: HIGH EICOSAPENTAENOIC ACID PRODUCING STRAINS OF YARROWIA LIPOLYTICA
  ref <310>: PATENT DOCUMENT NUMBER: US 2006-0115881-A1
  ref <311>: PATENT FILING DATE: 2005-11-02
  ref <312>: PUBLICATION DATE: 2006-06-01
  ref <313>: RELEVANT RESIDUES IN SEQ ID NO: (1)..(2987)
  ref <302>: TITLE: HIGH EICOSAPENTAENOIC ACID PRODUCING STRAINS OF YARROWIA LIPOLYTICA
  ref <310>: PATENT DOCUMENT NUMBER: WO 2006/052870
  ref <311>: PATENT FILING DATE: 2005-11-03
  ref <312>: PUBLICATION DATE: 2006-05-18
  ref <313>: RELEVANT RESIDUES IN SEQ ID NO: (1)..(2987)
ttccctagtcccagtgtacacccgccgatatcgcttaccctgcagccggattaaggttggcaatttttcacgtccttgtctccgcaattactcaccgggtggtttataagattgcaagcgtcttgatttgtctctgtatactaacatgcaatcgcgactcgcccgacgggccactaacctggccagaatctccagatccaagtattctcttggtctgcgatatgtttccaacacaaaagcccctgctgcccagccggcaactgctgagtgagtattccttgccataaacgacccagaaccactgtatagtgtttggaagcactagtcagaagaccagcgaaaacaggtggaaaaaactgagacgaaaagcaacgaccagaaatgtaatgtgtggaaaagcgacacacacagagcagataaagaggtgacaaataacgacaaatgaaatatcagtatcttcccacaatcactacctctcagctgtctgaaggtgcggctgatatatccatcccacgtctaacgtatggagtgtgatagaatatgacgacacaagcatgagaactcgctctctatccaaccaccgaaacactgtcactacagccgttcttgttgctccattcgcttttgtgattccatgccttctctggtgactgacaacattccttccttttctccagccctgttgttatctgctcatgacctacggccactctctatcgcatactaacatagacgatcccagcccgctccccacttccagggcaccgttggcaagcctcctatcctcaagaaggctgaggctgccaacgctgacatggacgagtccttcatcggaatgtctggaggagagatcttccacgagatgatgctgcgacacaacgtcgacactgtcttcggttaccccggtggagccattctccccgtctttgacgccattcacaactctgagtacttcaactttgtgctccctcgacacgagcagggtgccggccacatggccgagggctacgctcgagcctctggtaagcccggtgtcgttctcgtcacctctggccccggtgccaccaacgtcatcacccccatgcaggacgctctttccgatggtacccccatggttgtcttcaccggtcaggtcctgacctccgttatcggcactgacgccttccaggaggccgatgttgtcggcatctcccgatcttgcaccaagtggaacgtcatggtcaagaacgttgctgagctcccccgacgaatcaacgaggcctttgagattgctacttccggccgacccggtcccgttctcgtcgatctgcccaaggatgttactgctgccatcctgcgagagcccatccccaccaagtccaccattccctcgcattctctgaccaacctcacctctgccgccgccaccgagttccagaagcaggctatccagcgagccgccaacctcatcaaccagtccaagaagcccgtcctttacgtcggacagggtatccttggctccgaggagggtcctaagctgcttaaggagctggctgagaaggccgagattcccgtcaccactactctgcagggtcttggtgcctttgacgagcgagaccccaagtctctgcacatgctcggtatgcacggttccggctacgccaacatggccatgcagaacgctgactgtatcattgctctcggcgcccgatttgatgaccgagttaccggctccatccccaagtttgcccccgaggctcgagccgctgcccttgagggtcgaggtggtattgttcactttgagatccaggccaagaacatcaacaaggttgttcaggccaccgaagccgttgagggagacgttaccgagtctgtccgacagctcatccccctcatcaacaaggtctctgccgctgagcgagctccctggactgagactatccagtcctggaagcagcagttccccttcctcttcgaggctgaaggtgaggatggtgttatcaagccccagtccgtcattgctctgctctctgacctgacagagaacaacaaggacaagaccatcatcaccaccggtgttggtcagcatcagatgtggactgcccagcatttccgatggcgacaccctcgaaccatgatcacttctggtggtcttggaactatgggttacggcctgcccgccgctatcggcgccaaggttgcccgacctgactgcgacgtcattgacatcgatggtgacgcttctttcaacatgactctgaccgagctgtccaccgccgttcagttcaacattggcgtcaaggctattgtcctcaacaacgaggaacagggtatggtcacccagctgcagtctctcttctacgagaaccgatactgccacactcatcagaagaaccccgacttcatgaagctggccgagtccatgggcatgaagggtatccgaatcactcacattgaccagctggaggccggtctcaaggagatgctcgcatacaagggccctgtgctcgttgaggttgttgtcgacaagaagatccccgttcttcccatggttcccgctggtaaggctttgcatgagttccttgtctacgacgctgacgccgaggctgcttctcgacccgatcgactgaagaatgcccccgcccctcacgtccaccagaccacctttgagaactaagtggaaaggaacacaagcaatccgaaccaaaaataattggggtcccgtgcccacagagtctagtgcagacctaaaatgaccacagtaaattatagctgttattaaacatgagattttgaccaacaagagcgtaggaatgttattagctactacttgtacatacacagcatttgttttaaataatgttgcctccaggggcagtgagatcaggacccagatccgtggccagctctctgacttcagaccgcttgtacttaagcagctcgcaacactgttgtcgaggattgaacttgccatattcgattttgtggtcatgaatccagcacacctc

SEQ ID NO: 2 - DNA, 13066 bp, Artificial Sequence
  Plasmid pZP3-Pa777U
tctcggtctattcttttgatttataagggattttgccgatttcggcctattggttaaaaaatgagctgatttaacaaaaatttaacgcgaattttaacaaaatattaacgcttacaatttcctgatgcggtattttctccttacgcatctgtgcggtatttcacaccgcatcaggtggcacttttcggggaaatgtgcgcggaacccctatttgtttatttttctaaatacattcaaatatgtatccgctcatgagacaataaccctgataaatgcttcaataatattgaaaaaggaagagtatgagtattcaacatttccgtgtcgcccttattcccttttttgcggcattttgccttcctgtttttgctcacccagaaacgctggtgaaagtaaaagatgctgaagatcagttgggtgcacgagtgggttacatcgaactggatctcaacagcggtaagatccttgagagttttcgccccgaagaacgttttccaatgatgagcacttttaaagttctgctatgtggcgcggtattatcccgtattgacgccgggcaagagcaactcggtcgccgcatacactattctcagaatgacttggttgagtactcaccagtcacagaaaagcatcttacggatggcatgacagtaagagaattatgcagtgctgccataaccatgagtgataacactgcggccaacttacttctgacaacgatcggaggaccgaaggagctaaccgcttttttgcacaacatgggggatcatgtaactcgccttgatcgttgggaaccggagctgaatgaagccataccaaacgacgagcgtgacaccacgatgcctgtagcaatggcaacaacgttgcgcaaactattaactggcgaactacttactctagcttcccggcaacaattaatagactggatggaggcggataaagttgcaggaccacttctgcgctcggcccttccggctggctggtttattgctgataaatctggagccggtgagcgtgggtctcgcggtatcattgcagcactggggccagatggtaagccctcccgtatcgtagttatctacacgacggggagtcaggcaactatggatgaacgaaatagacagatcgctgagataggtgcctcactgattaagcattggtaactgtcagaccaagtttactcatatatactttagattgatttaaaacttcatttttaatttaaaaggatctaggtgaagatcctttttgataatctcatgaccaaaatcccttaacgtgagttttcgttccactgagcgtcagaccccgtagaaaagatcaaaggatcttcttgagatcctttttttctgcgcgtaatctgctgcttgcaaacaaaaaaaccaccgctaccagcggtggtttgtttgccggatcaagagctaccaactctttttccgaaggtaactggcttcagcagagcgcagataccaaatactgttcttctagtgtagccgtagttaggccaccacttcaagaactctgtagcaccgcctacatacctcgctctgctaatcctgttaccagtggctgctgccagtggcgataagtcgtgtcttaccgggttggactcaagacgatagttaccggataaggcgcagcggtcgggctgaacggggggttcgtgcacacagcccagcttggagcgaacgacctacaccgaactgagatacctacagcgtgagctatgagaaagcgccacgcttcccgaagggagaaaggcggacaggtatccggtaagcggcagggtcggaacaggagagcgcacgagggagcttccagggggaaacgcctggtatctttatagtcctgtcgggtttcgccacctctgacttgagcgtcgatttttgtgatgctcgtcaggggggcggagcctatggaaaaacgccagcaacgcggcctttttacggttcctggccttttgctggccttttgctcacatgttctttcctgcgttatcccctgattctgtggataaccgtattaccgcctttgagtgagctgataccgctcgccgcagccgaacgaccgagcgcagcgagtcagtgagcgaggaagcggaagagcgcccaatacgcaaaccgcctctccccgcgcgttggccgattcattaatgcagctggcgcgccaccaatcacaattctgaaaagcacatcttgatctcctcattgcggggagtccaacggtggtcttattcccccgaatttcccgctcaatctcgttccagaccgacccggacacagtgcttaacgccgttccgaaactctaccgcagatatgctccaacggactgggctgcatagatgtgatcctcggcttggagaaatggataaaagccggccaaaaaaaaagcggaaaaaagcggaaaaaaagagaaaaaaaatcgcaaaatttgaaaaatagggggaaaagacgcaaaaacgcaaggaggggggagtatatgacactgataagcaagctcacaacggttcctcttatttttttcctcatcttctgcctaggttcccaaaatcccagatgcttctctccagtgccaaaagtaagtaccccacaggttttcggccgaaaattccacgtgcagcaacgtcgtgtggggtgttaaaatgtggggggggggaaccaggacaagaggctcttgtgggagccgaatgagagcacaaagcgggcgggtgtgataagggcatttttgcccattttcccttctcctgtctctccgacggtgatggcgttgtgcgtcctctatttctttttatttctttttgttttatttctctgactaccgatttggtttgatttcctcaaccccacacaaataagctcgggccgaggaatatatatatacacggacacagtcgccctgtggacaacacgtcactacctctacgatacacaccgtacgttgtgtggaagcttgtgagcggataacaatttcacacaggaaacagctatgaccatgattacgccaagctcgaaattaaccctcactaaagggaacaaaagctggagctccaccgcggacacaatatctggtcaaatttcagtttcgttacatttaaattccttcacttcaagttcattcttcatctgcttctgttttactttgacaggcaaatgaagacatggtacgacttgatggaggccaagaacgccatttcaccccgagacaccgaagtgcctgaaatcctggctgcccccattgataacatcggaaactacggtattccggaaagtgtatatagaacctttccccagcttgtgtctgtggatatggatggtgtaatcccctttgagtactcgtcttggcttctctccgagcagtatgaggctctctaatctagcgcatttaatatctcaatgtatttatatatttatcttctcatgcggccgcttagttggctttggtcttggcagccttggcctccttgagggtaaacatcttggcatccttgtcgaccacgccgtacttggcgtacataagaccaattcggatgaaggtgggaatgatgggagaagccgactttcgcaccagttcgggaaaggcctgagcgaaggcagcagtggcctcgttgagcttgtagtgaggaatgatgggaaacagatggtggatctgatgtgtaccaatgttgtgggacaggttgtcgatgagggctccgtagcttcggtccacagaggacaagttgcccttgacataggtccactccgaatcggcgtaccagggagtttcctcgtcgttgtgatggaggaaggtagtgacaaccagcatggtggcgaatccaaagagaggtgcgaagtaatacagagccatggtcttgaggccgtagacgtaggtaaggtaggcgtacagaccagcaaaggccacgagagagccgagggaaatgatgacggcagacattcttcgcaggtagagaggctcccagggattgaagtggttgacctttcggggaggaaatccagcaacgaggtaggcaaaccaagccgaaccaagggagatgaccatgtgtcgggacaggggatgagagtcggcttctcgctgagggtagaagatctcatccttgtcgatgttgccggtgttcttgtgatggtgtcgatggctgatcttccacgactcgtagggagtcagaatgatggagtgaatgagtgtgccaacagagaagttgagcaggtgggatcgcgagaaggcaccatgtccacagtcgtgaccgatggtaaagaatccccagaacacgataccctggagcagaatgtagccagtgcaaaggacggcatcgagcagtgcaaactcctgcacgatagcaagggctcgagcatagtacagtccgagagcaagggaaccggcaatgcccagagctcgcacggtatagtagagggaccagggaacagaggcttcgaagcagtgggcaggcagggatcgcttgatctcggtgagagtagggaactcgtagggagcggcaacggtagaggaagccatggttgtgaattagggtggtgagaatggttggttgtagggaagaatcaaaggccggtctcgggatccgtgggtatatatatatatatatatatatacgatccttcgttacctccctgttctcaaaactgtggtttttcgtttttcgttttttgctttttttgatttttttagggccaactaagcttccagatttcgctaatcacctttgtactaattacaagaaaggaagaagctgattagagttgggctttttatgcaactgtgctactccttatctctgatatgaaagtgtagacccaatcacatcatgtcatttagagttggtaatactgggaggatagataaggcacgaaaacgagccatagcagacatgctgggtgtagccaagcagaagaaagtagatgggagccaattgacgagcgagggagctacgccaatccgacatacgacacgctgagatcgtcttggccggggggtacctacagatgtccaagggtaagtgcttgactgtaattgtatgtctgaggacaaatatgtagtcagccgtataaagtcataccaggcaccagtgccatcatcgaaccactaactctctatgatacatgcctccggtattattgtaccatgcgtcgctttgttacatacgtatcttgcctttttctctcagaaactccagactttggctattggtcgagataagcccggaccatagtgagtctttcacactctacatttctcccttgctccaactatcgattgttgtctactaactatcgtacgataacttcgtatagcatacattatacgaagttatcgcgtcgacgagtatctgtctgactcgtcattgccgcctttggagtacgactccaactatgagtgtgcttggatcactttgacgatacattcttcgttggaggctgtgggtctgacagctgcgttttcggcgcggttggccgacaacaatatcagctgcaacgtcattgctggctttcatcatgatcacatttttgtcggcaaaggcgacgcccagagagccattgacgttctttctaatttggaccgatagccgtatagtccagtctatctataagttcaactaactcgtaactattaccataacatatacttcactgccccagataaggttccgataaaaagttctgcagactaaatttatttcagtctcctcttcaccaccaaaatgccctcctacgaagctcgagctaacgtccacaagtccgcctttgccgctcgagtgctcaagctcgtggcagccaagaaaaccaacctgtgtgcttctctggatgttaccaccaccaaggagctcattgagcttgccgataaggtcggaccttatgtgtgcatgatcaaaacccatatcgacatcattgacgacttcacctacgccggcactgtgctccccctcaaggaacttgctcttaagcacggtttcttcctgttcgaggacagaaagttcgcagatattggcaacactgtcaagcaccagtaccggtgtcaccgaatcgccgagtggtccgatatcaccaacgcccacggtgtacccggaaccggaatcattgctggcctgcgagctggtgccgaggaaactgtctctgaacagaagaaggaggacgtctctgactacgagaactcccagtacaaggagttcctagtcccctctcccaacgagaagctggccagaggtctgctcatgctggccgagctgtcttgcaagggctctctggccactggcgagtactccaagcagaccattgagcttgcccgatccgaccccgagtttgtggttggcttcattgcccagaaccgacctaagggcgactctgaggactggcttattctgacccccggggtgggtcttgacgacaagggagacgctctcggacagcagtaccgaactgttgaggatgtcatgtctaccggaacggatatcataattgtcggccgaggtctgtacggccagaaccgagatcctattgaggaggccaagcgataccagaaggctggctgggaggcttaccagaagattaactgttagaggttagactatggatatgtaatttaactgtgtatatagagagcgtgcaagtatggagcgcttgttcagcttgtatgatggtcagacgacctgtctgatcgagtatgtatgatactgcacaacctgtgtatccgcatgatctgtccaatggggcatgttgttgtgtttctcgatacggagatgctgggtacagtgctaatacgttgaactacttatacttatatgaggctcgaagaaagctgacttgtgtatgacttattctcaactacatccccagtcacaataccaccactgcactaccactacaccaaaaccatgatcaaaccacccatggacttcctggaggcagaagaacttgttatggaaaagctcaagagagagatcataacttcgtatagcatacattatacgaagttatcctgcaggtaaaggaattcatgctgttcatcgtggttaatgctgctgtgtgctgtgtgtgtgtgttgtttggcgctcattgttgcgttatgcagcgtacaccacaatattggaagcttattagcctttctattttttcgtttgcaaggcttaacaacattgctgtggagagggatggggatatggaggccgctggagggagtcggagaggcgttttggagcggcttggcctggcgcccagctcgcgaaacgcacctaggaccctttggcacgccgaaatgtgccacttttcagtctagtaacgccttacctacgtcattccatgcgtgcatgtttgcgccttttttcccttgcccttgatcgccacacagtacagtgcactgtacagtggaggttttgggggggtcttagatgggagctaaaagcggcctagcggtacactagtgggattgtatggagtggcatggagcctaggtggagcctgacaggacgcacgaccggctagcccgtgacagacgatgggtggctcctgttgtccaccgcgtacaaatgtttgggccaaagtcttgtcagccttgcttgcgaacctaattcccaattttgtcacttcgcacccccattgatcgagccctaacccctgcccatcaggcaatccaattaagctcgcattgtctgccttgtttagtttggctcctgcccgtttcggcgtccacttgcacaaacacaaacaagcattatatataaggctcgtctctccctcccaaccacactcacttttttgcccgtcttcccttgctaacacaaaagtcaagaacacaaacaaccaccccaacccccttacacacaagacatatctacagcaatggccatggcttcttccactgttgctgcgccgtacgagttcccgacgctgacggagatcaagcgctcgctgccagcgcactgctttgaggcctcggtcccgtggtcgctctactacaccgtgcgcgcgctgggcatcgccggctcgctcgcgctcggcctctactacgcgcgcgcgctcgcgatcgtgcaggagtttgccctgctggatgcggtgctctgcacggggtacattctgctgcagggcatcgtattctgggggttcttcaccatcggccatgactgcggccacggcgcgttctcgcgttcgcacctgctcaacttcagcgtcggcacgctcattcactcgatcatcctcacgccgtacgagtcatggaagatctcgcaccgccaccaccacaagaacacgggcaacatcgacaaggacgagattttctacccgcagcgcgaggccgactcgcacccactgtcccgacacatggtgatctcgctcggctcggcctggttcgcgtacctcgttgcgggcttccctcctcgcaaggtgaaccacttcaacccttgggaaccgttgtacctgcgccgcatgtctgccgtcatcatctcactcggctcgctcgtggcgttcgcgggcttgtatgcgtatctcacctacgtctatggccttaagaccatggcgctgtactacttcgcccctctctttgggttcgccacgatgctcgtggtcactacctttttgcaccacaatgacgaggaaacgccatggtacgccgactcggagtggacgtacgtcaagggcaacctctcgtccgtggaccgctcgtacggcgcgctcatcgacaacctgagccacaacatcggcacgcaccagatccaccacctgtttccgatcatcccgcactacaagctgaacgaggcgacggcagcgttcgcgcaggcgttcccggagctcgtgcgcaagagcgcgtcgccgatcatcccgacgttcatccgcatcgggctcatgtacgccaagtacggcgtcgtggacaaggacgccaagatgtttacgctcaaggaggccaaggccgccaagaccaaggccaactaggcggccgcattgatgattggaaacacacacatgggttatatctaggtgagagttagttggacagttatatattaaatcagctatgccaacggtaacttcattcatgtcaacgaggaaccagtgactgcaagtaatatagaatttgaccaccttgccattctcttgcactcctttactatatctcatttatttcttatatacaaatcacttcttcttcccagcatcgagctcggaaacctcatgagcaataacatcgtggatctcgtcaatagagggctttttggactccttgctgttggccaccttgtccttgctgtttaaacagtgtacgcagatctactatagaggaacatttaaattgccccggagaagacggccaggccgcctagatgacaaattcaacaactcacagctgactttctgccattgccactaggggggggcctttttatatggccaagccaagctctccacgtcggttgggctgcacccaacaataaatgggtagggttgcaccaacaaagggatgggatggggggtagaagatacgaggataacggggctcaatggcacaaataagaacgaatactgccattaagactcgtgatccagcgactgacaccattgcatcatctaagggcctcaaaactacctcggaactgctgcgctgatctggacaccacagaggttccgagcactttaggttgcaccaaatgtcccaccaggtgcaggcagaaaacgctggaacagcgtgtacagtttgtcttaacaaaaagtgagggcgctgaggtcgagcagggtggtgtgacttgttatagcctttagagctgcgaaagcgcgtatggatttggctcatcaggccagattgagggtctgtggacacatgtcatgttagtgtacttcaatcgccccctggatatagccccgacaataggccgtggcctcatttttttgccttccgcacatttccattgctcggtacccacaccttgcttctcctgcacttgccaaccttaatactggtttacattgaccaacatcttacaagcggggggcttgtctagggtatatataaacagtggctctcccaatcggttgccagtctcttttttcctttctttccccacagattcgaaatctaaactacacatcacagaattccgagccgtgagtatccacgacaagatcagtgtcgagacgacgcgttttgtgtaatgacacaatccgaaagtcgctagcaacacacactctctacacaaactaacccagctctggtaccatggcttcttccactgttgctgcgccgtacgagttcccgacgctgacggagatcaagcgctcgctgccagcgcactgctttgaggcctcggtcccgtggtcgctctactacaccgtgcgcgcgctgggcatcgccggctcgctcgcgctcggcctctactacgcgcgcgcgctcgcgatcgtgcaggagtttgccctgctggatgcggtgctctgcacggggtacattctgctgcagggcatcgtattctgggggttcttcaccatcggccatgactgcggccacggcgcgttctcgcgttcgcacctgctcaacttcagcgtcggcacgctcattcactcgatcatcctcacgccgtacgagtcatggaagatctcgcaccgccaccaccacaagaacacgggcaacatcgacaaggacgagattttctacccgcagcgcgaggccgactcgcacccactgtcccgacacatggtgatctcgctcggctcggcctggttcgcgtacctcgttgcgggcttccctcctcgcaaggtgaaccacttcaacccttgggaaccgttgtacctgcgccgcatgtctgccgtcatcatctcactcggctcgctcgtggcgttcgcgggcttgtatgcgtatctcacctacgtctatggccttaagaccatggcgctgtactacttcgcccctctctttgggttcgccacgatgctcgtggtcactacctttttgcaccacaatgacgaggaaacgccatggtacgccgactcggagtggacgtacgtcaagggcaacctctcgtccgtggaccgctcgtacggcgcgctcatcgacaacctgagccacaacatcggcacgcaccagatccaccacctgtttccgatcatcccgcactacaagctgaacgaggcgacggcagcgttcgcgcaggcgttcccggagctcgtgcgcaagagcgcgtcgccgatcatcccgacgttcatccgcatcgggctcatgtacgccaagtacggcgtcgtggacaaggacgccaagatgtttacgctcaaggaggccaaggccgccaagaccaaggccaactaggcggccgcatggagcgtgtgttctgagtcgatgttttctatggagttgtgagtgttagtagacatgatgggtttatatatgatgaatgaatagatgtgattttgatttgcacgatggaattgagaactttgtaaacgtacatgggaatgtatgaatgtgggggttttgtgactggataactgacggtcagtggacgccgttgttcaaatatccaagagatgcgagaaactttgggtcaagtgaacatgtcctctctgttcaagtaaaccatcaactatgggtagtatatttagtaaggacaagagttgagattctttggagtcctagaaacgtattttcgcgttccaagatcaaattagtagagtaatacgggcacgggaatccattcatagtctcaatcctgcaggtgagttaattaagatgacgacatttgcgagctggacgaggaatagatggagcgtgtgttctgagtcgatgttttctatggagttgtgagtgttagtagacatgatgggtttatatatgatgaatgaatagatgtgattttgatttgcacgatggaattgagaactttgtaaacgtacatgggaatgtatgaatgtgggggttttgtgactggataactgacggtcagtggacgccgttgttcaaatatccaagagatgcgagaaactttgggtcaagtgaacatgtcctctctgttcaagtaaaccatcaactatgggtagtatatttagtaaggacaagagttgagattctttggagtcctagaaacgtattttcgcgttccaagatcaaattagtagagtaatacgggcacgggaatccattcatagtctcaattttcccataggtgtgctacaaggtgttgagatgtggtacagtaccaccatgattcgaggtaaagagcccagaagtcattgatgaggtcaagaaatacacagatctacagctcaatacaatgaatatcttctttcatattcttcaggtgacaccaagggtgtctattttccccagaaatgcgtgaaaaggcgcgtgtgtagcgtggagtatgggttcggttggcgtatccttcatatatcgacgaaatagtagggcaagagatgacaaaaagtatctatatgtagacagcgtagaatatggatttgattggtataaattcatttattgcgtgtctcacaaatactctcgataagttggggttaaactggagatggaacaatgtcgatatctcgacgcatgcgacgtcgggcccaattcgccctatagtgagtcgtattacaattcactggccgtcgttttacaacgtcgtgactgggaaaaccctggcgttacccaacttaatcgccttgcagcacatccccctttcgccagctggcgtaatagcgaagaggcccgcaccgatcgcccttcccaacagttgcgcagcctgaatggcgaatggacgcgccctgtagcggcgcattaagcgcggcgggtgtggtggttacgcgcagcgtgaccgctacacttgccagcgccctagcgcccgctcctttcgctttcttcccttcctttctcgccacgttcgccggctttccccgtcaagctctaaatcgggggctccctttagggttccgatttagtgctttacggcacctcgaccccaaaaaacttgattagggtgatggttcacgtagtgggccatcgccctgatagacggtttttcgccctttgacgttggagtccacgttctttaatagtggactcttgttccaaactggaacaacactcaacccta

SEQ ID NO: 3 - DNA, 777 bp, Euglena gracilis
  CDS (1)..(777): delta-9 elongase
  ref <302>: TITLE: DELTA-9 ELONGASES AND THEIR USE IN MAKING POLYUNSATURATED FATTY ACIDS
  ref <310>: PATENT DOCUMENT NUMBER: WO 2007/061742
  ref <311>: PATENT FILING DATE: 2006-11-16
  ref <312>: PUBLICATION DATE: 2007-05-31
  ref <313>: RELEVANT RESIDUES IN SEQ ID NO: (1)..(777)
  ref <302>: TITLE: DELTA-9 ELONGASES AND THEIR USE IN MAKING POLYUNSATURATED FATTY ACIDS
  ref <310>: PATENT DOCUMENT NUMBER: US 2007-0117190-A1
  ref <311>: PATENT FILING DATE: 2006-11-16
  ref <312>: PUBLICATION DATE: 2007-05-24
  ref <313>: RELEVANT RESIDUES IN SEQ ID NO: (1)..(777)
atggaggtggtgaatgaaatagtctcaattgggcaggaagttttacccaaagttgattatgcccaactctggagtgatgccagtcactgtgaggtgctttacttgtccatcgcatttgtcatcttgaagttcactcttggcccccttggtccaaaaggtcagtctcgtatgaagtttgttttcaccaattacaaccttctcatgtccatttattcgttgggatcattcctctcaatggcatatgccatgtacaccatcggtgttatgtctgacaactgcgagaaggcttttgacaacaacgtcttcaggatcaccacgcagttgttctatttgagcaagttcctggagtatattgactccttctatttgccactgatgggcaagcctctgacctggttgcaattcttccatcatttgggggcaccgatggatatgtggctgttctataattaccgaaatgaagctgtttggatttttgtgctgttgaatggtttcatccactggatcatgtacggttattattggaccagattgatcaagctgaagttccccatgccaaaatccctgattacatcaatgcagatcattcaattcaatgttggtttctacattgtctggaagtacaggaacattccctgttatcgccaagatgggatgaggatgtttggctggttcttcaattacttttatgttggcacagtcttgtgtttgttcttgaatttctatgtgcaaacgtatatcgtcaggaagcacaagggagccaaaaagattcagtga

SEQ ID NO: 4 - protein, 258 aa, Euglena gracilis
MEVVNEIVSIGQEVLPKVDYAQLWSDASHCEVLYLSIAFVILKFTLGPLGPKGQSRMKFVFTNYNLLMSIYSLGSFLSMAYAMYTIGVMSDNCEKAFDNNVFRITTQLFYLSKFLEYIDSFYLPLMGKPLTWLQFFHHLGAPMDMWLFYNYRNEAVWIFVLLNGFIHWIMYGYYWTRLIKLKFPMPKSLITSMQIIQFNVGFYIVWKYRNIPCYRQDGMRMFGWFFNYFYVGTVLCLFLNFYVQTYIVRKHKGAKKIQ

SEQ ID NO: 5 - DNA, 8165 bp, Artificial Sequence
  Plasmid pZUF17
gtacgagccggaagcataaagtgtaaagcctggggtgcctaatgagtgagctaactcacattaattgcgttgcgctcactgcccgctttccagtcgggaaacctgtcgtgccagctgcattaatgaatcggccaacgcgcggggagaggcggtttgcgtattgggcgctcttccgcttcctcgctcactgactcgctgcgctcggtcgttcggctgcggcgagcggtatcagctcactcaaaggcggtaatacggttatccacagaatcaggggataacgcaggaaagaacatgtgagcaaaaggccagcaaaaggccaggaaccgtaaaaaggccgcgttgctggcgtttttccataggctccgcccccctgacgagcatcacaaaaatcgacgctcaagtcagaggtggcgaaacccgacaggactataaagataccaggcgtttccccctggaagctccctcgtgcgctctcctgttccgaccctgccgcttaccggatacctgtccgcctttctcccttcgggaagcgtggcgctttctcatagctcacgctgtaggtatctcagttcggtgtaggtcgttcgctccaagctgggctgtgtgcacgaaccccccgttcagcccgaccgctgcgccttatccggtaactatcgtcttgagtccaacccggtaagacacgacttatcgccactggcagcagccactggtaacaggattagcagagcgaggtatgtaggcggtgctacagagttcttgaagtggtggcctaactacggctacactagaaggacagtatttggtatctgcgctctgctgaagccagttaccttcggaaaaagagttggtagctcttgatccggcaaacaaaccaccgctggtagcggtggtttttttgtttgcaagcagcagattacgcgcagaaaaaaaggatctcaagaagatcctttgatcttttctacggggtctgacgctcagtggaacgaaaactcacgttaagggattttggtcatgagattatcaaaaaggatcttcacctagatccttttaaattaaaaatgaagttttaaatcaatctaaagtatatatgagtaaacttggtctgacagttaccaatgcttaatcagtgaggcacctatctcagcgatctgtctatttcgttcatccatagttgcctgactccccgtcgtgtagataactacgatacgggagggcttaccatctggccccagtgctgcaatgataccgcgagacccacgctcaccggctccagatttatcagcaataaaccagccagccggaagggccgagcgcagaagtggtcctgcaactttatccgcctccatccagtctattaattgttgccgggaagctagagtaagtagttcgccagttaatagtttgcgcaacgttgttgccattgctacaggcatcgtggtgtcacgctcgtcgtttggtatggcttcattcagctccggttcccaacgatcaaggcgagttacatgatcccccatgttgtgcaaaaaagcggttagctccttcggtcctccgatcgttgtcagaagtaagttggccgcagtgttatcactcatggttatggcagcactgcataattctcttactgtcatgccatccgtaagatgcttttctgtgactggtgagtactcaaccaagtcattctgagaatagtgtatgcggcgaccgagttgctcttgcccggcgtcaatacgggataataccgcgccacatagcagaactttaaaagtgctcatcattggaaaacgttcttcggggcgaaaactctcaaggatcttaccgctgttgagatccagttcgatgtaacccactcgtgcacccaactgatcttcagcatcttttactttcaccagcgtttctgggtgagcaaaaacaggaaggcaaaatgccgcaaaaaagggaataagggcgacacggaaatgttgaatactcatactcttcctttttcaatattattgaagcatttatcagggttattgtctcatgagcggatacatatttgaatgtatttagaaaaataaacaaataggggttccgcgcacatttccccgaaaagtgccacctgacgcgccctgtagcggcgcattaagcgcggcgggtgtggtggttacgcgcagcgtgaccgctacacttgccagcgccctagcgcccgctcctttcgctttcttcccttcctttctcgccacgttcgccggctttccccgtcaagctctaaatcgggggctccctttagggttccgatttagtgctttacggcacctcgaccccaaaaaacttgattagggtgatggttcacgtagtgggccatcgccctgatagacggtttttcgccctttgacgttggagtccacgttctttaatagtggactcttgttccaaactggaacaacactcaaccctatctcggtctattcttttgatttataagggattttgccgatttcggcctattggttaaaaaatgagctgatttaacaaaaatttaacgcgaattttaacaaaatattaacgcttacaatttccattcgccattcaggctgcgcaactgttgggaagggcgatcggtgcgggcctcttcgctattacgccagctggcgaaagggggatgtgctgcaaggcgattaagttgggtaacgccagggttttcccagtcacgacgttgtaaaacgacggccagtgaattgtaatacgactcactatagggcgaattgggtaccgggccccccctcgaggtcgatggtgtcgataagcttgatatcgaattcatgtcacacaaaccgatcttcgcctcaaggaaacctaattctacatccgagagactgccgagatccagtctacactgattaattttcgggccaataatttaaaaaaatcgtgttatataatattatatgtattatatatatacatcatgatgatactgacagtcatgtcccattgctaaatagacagactccatctgccgcctccaactgatgttctcaatatttaaggggtcatctcgcattgtttaataataaacagactccatctaccgcctccaaatgatgttctcaaaatatattgtatgaacttatttttattacttagtattattagacaacttacttgctttatgaaaaacacttcctatttaggaaacaatttataatggcagttcgttcatttaacaatttatgtagaataaatgttataaatgcgtatgggaaatcttaaatatggatagcataaatgatatctgcattgcctaattcgaaatcaacagcaacgaaaaaaatcccttgtacaacataaatagtcatcgagaaatatcaactatcaaagaacagctattcacacgttactattgagattattattggacgagaatcacacactcaactgtctttctctcttctagaaatacaggtacaagtatgtactattctcattgttcatacttctagtcatttcatcccacatattccttggatttctctccaatgaatgacattctatcttgcaaattcaacaattataataagatataccaaagtagcggtatagtggcaatcaaaaagcttctctggtgtgcttctcgtatttatttttattctaatgatccattaaaggtatatatttatttcttgttatataatccttttgtttattacatgggctggatacataaaggtattttgatttaattttttgcttaaattcaatcccccctcgttcagtgtcaactgtaatggtaggaaattaccatacttttgaagaagcaaaaaaaatgaaagaaaaaaaaaatcgtatttccaggttagacgttccgcagaatctagaatgcggtatgcggtacattgttcttcgaacgtaaaagttgcgctccctgagatattgtacatttttgcttttacaagtacaagtacatcgtacaactatgtactactgttgatgcatccacaacagtttgttttgtttttttttgttttttttttttctaatgattcattaccgctatgtatacctacttgtacttgtagtaagccgggttattggcgttcaattaatcatagacttatgaatctgcacggtgtgcgctgcgagttacttttagcttatgcatgctacttgggtgtaatattgggatctgttcggaaatcaacggatgctcaatcgatttcgacagtaattaattaagtcatacacaagtcagctttcttcgagcctcatataagtataagtagttcaacgtattagcactgtacccagcatctccgtatcgagaaacacaacaacatgccccattggacagatcatgcggatacacaggttgtgcagtatcatacatactcgatcagacaggtcgtctgaccatcatacaagctgaacaagcgctccatacttgcacgctctctatatacacagttaaattacatatccatagtctaacctctaacagttaatcttctggtaagcctcccagccagccttctggtatcgcttggcctcctcaataggatctcggttctggccgtacagacctcggccgacaattatgatatccgttccggtagacatgacatcctcaacagttcggtactgctgtccgagagcgtctcccttgtcgtcaagacccaccccgggggtcagaataagccagtcctcagagtcgcccttaggtcggttctgggcaatgaagccaaccacaaactcggggtcggatcgggcaagctcaatggtctgcttggagtactcgccagtggccagagagcccttgcaagacagctcggccagcatgagcagacctctggccagcttctcgttgggagaggggactaggaactccttgtactgggagttctcgtagtcagagacgtcctccttcttctgttcagagacagtttcctcggcaccagctcgcaggccagcaatgattccggttccgggtacaccgtgggcgttggtgatatcggaccactcggcgattcggtgacaccggtactggtgcttgacagtgttgccaatatctgcgaactttctgtcctcgaacaggaagaaaccgtgcttaagagcaagttccttgagggggagcacagtgccggcgtaggtgaagtcgtcaatgatgtcgatatgggttttgatcatgcacacataaggtccgaccttatcggcaagctcaatgagctccttggtggtggtaacatccagagaagcacacaggttggttttcttggctgccacgagcttgagcactcgagcggcaaaggcggacttgtggacgttagctcgagcttcgtaggagggcattttggtggtgaagaggagactgaaataaatttagtctgcagaactttttatcggaaccttatctggggcagtgaagtatatgttatggtaatagttacgagttagttgaacttatagatagactggactatacggctatcggtccaaattagaaagaacgtcaatggctctctgggcgtcgcctttgccgacaaaaatgtgatcatgatgaaagccagcaatgacgttgcagctgatattgttgtcggccaaccgcgccgaaaacgcagctgtcagacccacagcctccaacgaagaatgtatcgtcaaagtgatccaagcacactcatagttggagtcgtactccaaaggcggcaatgacgagtcagacagatactcgtcgactcaggcgacgacggaattcctgcagcccatctgcagaattcaggagagaccgggttggcggcgtatttgtgtcccaaaaaacagccccaattgccccggagaagacggccaggccgcctagatgacaaattcaacaactcacagctgactttctgccattgccactaggggggggcctttttatatggccaagccaagctctccacgtcggttgggctgcacccaacaataaatgggtagggttgcaccaacaaagggatgggatggggggtagaagatacgaggataacggggctcaatggcacaaataagaacgaatactgccattaagactcgtgatccagcgactgacaccattgcatcatctaagggcctcaaaactacctcggaactgctgcgctgatctggacaccacagaggttccgagcactttaggttgcaccaaatgtcccaccaggtgcaggcagaaaacgctggaacagcgtgtacagtttgtcttaacaaaaagtgagggcgctgaggtcgagcagggtggtgtgacttgttatagcctttagagctgcgaaagcgcgtatggatttggctcatcaggccagattgagggtctgtggacacatgtcatgttagtgtacttcaatcgccccctggatatagccccgacaataggccgtggcctcatttttttgccttccgcacatttccattgctcggtacccacaccttgcttctcctgcacttgccaaccttaatactggtttacattgaccaacatcttacaagcggggggcttgtctagggtatatataaacagtggctctcccaatcggttgccagtctcttttttcctttctttccccacagattcgaaatctaaactacacatcacacaatgcctgttactgacgtccttaagcgaaagtccggtgtcatcgtcggcgacgatgtccgagccgtgagtatccacgacaagatcagtgtcgagacgacgcgttttgtgtaatgacacaatccgaaagtcgctagcaacacacactctctacacaaactaacccagctctccatggctgaggataagaccaaggtcgagttccctaccctgactgagctgaagcactctatccctaacgcttgctttgagtccaacctcggactctcgctctactacactgcccgagcgatcttcaacgcatctgcctctgctgctctgctctacgctgcccgatctactcccttcattgccgataacgttctgctccacgctctggtttgcgccacctacatctacgtgcagggtgtcatcttctggggtttctttaccgtcggtcacgactgtggtcactctgccttctcccgataccactccgtcaacttcatcattggctgcatcatgcactctgccattctgactcccttcgagtcctggcgagtgacccaccgacaccatcacaagaacactggcaacattgataaggacgagatcttctaccctcatcggtccgtcaaggacctccaggacgtgcgacaatgggtctacaccctcggaggtgcttggtttgtctacctgaaggtcggatatgctcctcgaaccatgtcccactttgacccctgggaccctctcctgcttcgacgagcctccgctgtcatcgtgtccctcggagtctgggctgccttcttcgctgcctacgcctacctcacatactcgctcggctttgccgtcatgggcctctactactatgctcctctctttgtctttgcttcgttcctcgtcattactaccttcttgcatcacaacgacgaagctactccctggtacggtgactcggagtggacctacgtcaagggcaacctgagctccgtcgaccgatcgtacggagctttcgtggacaacctgtctcaccacattggcacccaccaggtccatcacttgttccctatcattccccactacaagctcaacgaagccaccaagcactttgctgccgcttaccctcacctcgtgagacgtaacgacgagcccatcattactgccttcttcaagaccgctcacctctttgtcaactacggagctgtgcccgagactgctcagattttcaccctcaaagagtctgccgctgcagccaaggccaagagcgactaagcggccgcaagtgtggatggggaagtgagtgcccggttctgtgtgcacaattggcaatccaagatggatggattcaacacagggatatagcgagctacgtggtggtgcgaggatatagcaacggatatttatgtttgacacttgagaatgtacgatacaagcactgtccaagtacaatactaaacatactgtacatactcatactcgtacccgggcaacggtttcacttgagtgcagtggctagtgctcttactcgtacagtgtgcaatactgcgtatcatagtctttgatgtatatcgtattcattcatgttagttgc

SEQ ID NO: 6 - DNA, 7865 bp, Artificial Sequence
  Plasmid pDMW359
catggaggtggtgaatgaaatagtctcaattgggcaggaagttttacccaaagttgattatgcccaactctggagtgatgccagtcactgtgaggtgctttacttgtccatcgcatttgtcatcttgaagttcactcttggcccccttggtccaaaaggtcagtctcgtatgaagtttgttttcaccaattacaaccttctcatgtccatttattcgttgggatcattcctctcaatggcatatgccatgtacaccatcggtgttatgtctgacaactgcgagaaggcttttgacaacaacgtcttcaggatcaccacgcagttgttctatttgagcaagttcctggagtatattgactccttctatttgccactgatgggcaagcctctgacctggttgcaattcttccatcatttgggggcaccgatggatatgtggctgttctataattaccgaaatgaagctgtttggatttttgtgctgttgaatggtttcatccactggatcatgtacggttattattggaccagattgatcaagctgaagttccccatgccaaaatccctgattacatcaatgcagatcattcaattcaatgttggtttctacattgtctggaagtacaggaacattccctgttatcgccaagatgggatgaggatgtttggctggttcttcaattacttttatgttggcacagtcttgtgtttgttcttgaatttctatgtgcaaacgtatatcgtcaggaagcacaagggagccaaaaagattcagtgagcggccgcaagtgtggatggggaagtgagtgcccggttctgtgtgcacaattggcaatccaagatggatggattcaacacagggatatagcgagctacgtggtggtgcgaggatatagcaacggatatttatgtttgacacttgagaatgtacgatacaagcactgtccaagtacaatactaaacatactgtacatactcatactcgtacccgggcaacggtttcacttgagtgcagtggctagtgctcttactcgtacagtgtgcaatactgcgtatcatagtctttgatgtatatcgtattcattcatgttagttgcgtacgagccggaagcataaagtgtaaagcctggggtgcctaatgagtgagctaactcacattaattgcgttgcgctcactgcccgctttccagtcgggaaacctgtcgtgccagctgcattaatgaatcggccaacgcgcggggagaggcggtttgcgtattgggcgctcttccgcttcctcgctcactgactcgctgcgctcggtcgttcggctgcggcgagcggtatcagctcactcaaaggcggtaatacggttatccacagaatcaggggataacgcaggaaagaacatgtgagcaaaaggccagcaaaaggccaggaaccgtaaaaaggccgcgttgctggcgtttttccataggctccgcccccctgacgagcatcacaaaaatcgacgctcaagtcagaggtggcgaaacccgacaggactataaagataccaggcgtttccccctggaagctccctcgtgcgctctcctgttccgaccctgccgcttaccggatacctgtccgcctttctcccttcgggaagcgtggcgctttctcatagctcacgctgtaggtatctcagttcggtgtaggtcgttcgctccaagctgggctgtgtgcacgaaccccccgttcagcccgaccgctgcgccttatccggtaactatcgtcttgagtccaacccggtaagacacgacttatcgccactggcagcagccactggtaacaggattagcagagcgaggtatgtaggcggtgctacagagttcttgaagtggtggcctaactacggctacactagaaggacagtatttggtatctgcgctctgctgaagccagttaccttcggaaaaagagttggtagctcttgatccggcaaacaaaccaccgctggtagcggtggtttttttgtttgcaagcagcagattacgcgcagaaaaaaaggatctcaagaagatcctttgatcttttctacggggtctgacgctcagtggaacgaaaactcacgttaagggattttggtcatgagattatcaaaaaggatcttcacctagatccttttaaattaaaaatgaagttttaaatcaatctaaagtatatatgagtaaacttggtctgacagttaccaatgcttaatcagtgaggcacctatctcagcgatctgtctatttcgttcatccatagttgcctgactccccgtcgtgtagataactacgatacgggagggcttaccatctggccccagtgctgcaatgataccgcgagacccacgctcaccggctccagatttatcagcaataaaccagccagccggaagggccgagcgcagaagtggtcctgcaactttatccgcctccatccagtctattaattgttgccgggaagctagagtaagtagttcgccagttaatagtttgcgcaacgttgttgccattgctacaggcatcgtggtgtcacgctcgtcgtttggtatggcttcattcagctccggttcccaacgatcaaggcgagttacatgatcccccatgttgtgcaaaaaagcggttagctccttcggtcctccgatcgttgtcagaagtaagttggccgcagtgttatcactcatggttatggcagcactgcataattctcttactgtcatgccatccgtaagatgcttttctgtgactggtgagtactcaaccaagtcattctgagaatagtgtatgcggcgaccgagttgctcttgcccggcgtcaatacgggataataccgcgccacatagcagaactttaaaagtgctcatcattggaaaacgttcttcggggcgaaaactctcaaggatcttaccgctgttgagatccagttcgatgtaacccactcgtgcacccaactgatcttcagcatcttttactttcaccagcgtttctgggtgagcaaaaacaggaaggcaaaatgccgcaaaaaagggaataagggcgacacggaaatgttgaatactcatactcttcctttttcaatattattgaagcatttatcagggttattgtctcatgagcggatacatatttgaatgtatttagaaaaataaacaaataggggttccgcgcacatttccccgaaaagtgccacctgacgcgccctgtagcggcgcattaagcgcggcgggtgtggtggttacgcgcagcgtgaccgctacacttgccagcgccctagcgcccgctcctttcgctttcttcccttcctttctcgccacgttcgccggctttccccgtcaagctctaaatcgggggctccctttagggttccgatttagtgctttacggcacctcgaccccaaaaaacttgattagggtgatggttcacgtagtgggccatcgccctgatagacggtttttcgccctttgacgttggagtccacgttctttaatagtggactcttgttccaaactggaacaacactcaaccctatctcggtctattcttttgatttataagggattttgccgatttcggcctattggttaaaaaatgagctgatttaacaaaaatttaacgcgaattttaacaaaatattaacgcttacaatttccattcgccattcaggctgcgcaactgttgggaagggcgatcggtgcgggcctcttcgctattacgccagctggcgaaagggggatgtgctgcaaggcgattaagttgggtaacgccagggttttcccagtcacgacgttgtaaaacgacggccagtgaattgtaatacgactcactatagggcgaattgggtaccgggccccccctcgaggtcgatggtgtcgataagcttgatatcgaattcatgtcacacaaaccgatcttcgcctcaaggaaacctaattctacatccgagagactgccgagatccagtctacactgattaattttcgggccaataatttaaaaaaatcgtgttatataatattatatgtattatatatatacatcatgatgatactgacagtcatgtcccattgctaaatagacagactccatctgccgcctccaactgatgttctcaatatttaaggggtcatctcgcattgtttaataataaacagactccatctaccgcctccaaatgatgttctcaaaatatattgtatgaacttatttttattacttagtattattagacaacttacttgctttatgaaaaacacttcctatttaggaaacaatttataatggcagttcgttcatttaacaatttatgtagaataaatgttataaatgcgtatgggaaatcttaaatatggatagcataaatgatatctgcattgcctaattcgaaatcaacagcaacgaaaaaaatcccttgtacaacataaatagtcatcgagaaatatcaactatcaaagaacagctattcacacgttactattgagattattattggacgagaatcacacactcaactgtctttctctcttctagaaatacaggtacaagtatgtactattctcattgttcatacttctagtcatttcatcccacatattccttggatttctctccaatgaatgacattctatcttgcaaattcaacaattataataagatataccaaagtagcggtatagtggcaatcaaaaagcttctctggtgtgcttctcgtatttatttttattctaatgatccattaaaggtatatatttatttcttgttatataatccttttgtttattacatgggctggatacataaaggtattttgatttaattttttgcttaaattcaatcccccctcgttcagtgtcaactgtaatggtaggaaattaccatacttttgaagaagcaaaaaaaatgaaagaaaaaaaaaatcgtatttccaggttagacgttccgcagaatctagaatgcggtatgcggtacattgttcttcgaacgtaaaagttgcgctccctgagatattgtacatttttgcttttacaagtacaagtacatcgtacaactatgtactactgttgatgcatccacaacagtttgttttgtttttttttgttttttttttttctaatgattcattaccgctatgtatacctacttgtacttgtagtaagccgggttattggcgttcaattaatcatagacttatgaatctgcacggtgtgcgctgcgagttacttttagcttatgcatgctacttgggtgtaatattgggatctgttcggaaatcaacggatgctcaatcgatttcgacagtaattaattaagtcatacacaagtcagctttcttcgagcctcatataagtataagtagttcaacgtattagcactgtacccagcatctccgtatcgagaaacacaacaacatgccccattggacagatcatgcggatacacaggttgtgcagtatcatacatactcgatcagacaggtcgtctgaccatcatacaagctgaacaagcgctccatacttgcacgctctctatatacacagttaaattacatatccatagtctaacctctaacagttaatcttctggtaagcctcccagccagccttctggtatcgcttggcctcctcaataggatctcggttctggccgtacagacctcggccgacaattatgatatccgttccggtagacatgacatcctcaacagttcggtactgctgtccgagagcgtctcccttgtcgtcaagacccaccccgggggtcagaataagccagtcctcagagtcgcccttaggtcggttctgggcaatgaagccaaccacaaactcggggtcggatcgggcaagctcaatggtctgcttggagtactcgccagtggccagagagcccttgcaagacagctcggccagcatgagcagacctctggccagcttctcgttgggagaggggactaggaactccttgtactgggagttctcgtagtcagagacgtcctccttcttctgttcagagacagtttcctcggcaccagctcgcaggccagcaatgattccggttccgggtacaccgtgggcgttggtgatatcggaccactcggcgattcggtgacaccggtactggtgcttgacagtgttgccaatatctgcgaactttctgtcctcgaacaggaagaaaccgtgcttaagagcaagttccttgagggggagcacagtgccggcgtaggtgaagtcgtcaatgatgtcgatatgggttttgatcatgcacacataaggtccgaccttatcggcaagctcaatgagctccttggtggtggtaacatccagagaagcacacaggttggttttcttggctgccacgagcttgagcactcgagcggcaaaggcggacttgtggacgttagctcgagcttcgtaggagggcattttggtggtgaagaggagactgaaataaatttagtctgcagaactttttatcggaaccttatctggggcagtgaagtatatgttatggtaatagttacgagttagttgaacttatagatagactggactatacggctatcggtccaaattagaaagaacgtcaatggctctctgggcgtcgcctttgccgacaaaaatgtgatcatgatgaaagccagcaatgacgttgcagctgatattgttgtcggccaaccgcgccgaaaacgcagctgtcagacccacagcctccaacgaagaatgtatcgtcaaagtgatccaagcacactcatagttggagtcgtactccaaaggcggcaatgacgagtcagacagatactcgtcgactcaggcgacgacggaattcctgcagcccatctgcagaattcaggagagaccgggttggcggcgtatttgtgtcccaaaaaacagccccaattgccccggagaagacggccaggccgcctagatgacaaattcaacaactcacagctgactttctgccattgccactaggggggggcctttttatatggccaagccaagctctccacgtcggttgggctgcacccaacaataaatgggtagggttgcaccaacaaagggatgggatggggggtagaagatacgaggataacggggctcaatggcacaaataagaacgaatactgccattaagactcgtgatccagcgactgacaccattgcatcatctaagggcctcaaaactacctcggaactgctgcgctgatctggacaccacagaggttccgagcactttaggttgcaccaaatgtcccaccaggtgcaggcagaaaacgctggaacagcgtgtacagtttgtcttaacaaaaagtgagggcgctgaggtcgagcagggtggtgtgacttgttatagcctttagagctgcgaaagcgcgtatggatttggctcatcaggccagattgagggtctgtggacacatgtcatgttagtgtacttcaatcgccccctggatatagccccgacaataggccgtggcctcatttttttgccttccgcacatttccattgctcggtacccacaccttgcttctcctgcacttgccaaccttaatactggtttacattgaccaacatcttacaagcggggggcttgtctagggtatatataaacagtggctctcccaatcggttgccagtctcttttttcctttctttccccacagattcgaaatctaaactacacatcacacaatgcctgttactgacgtccttaagcgaaagtccggtgtcatcgtcggcgacgatgtccgagccgtgagtatccacgacaagatcagtgtcgagacgacgcgttttgtgtaatgacacaatccgaaagtcgctagcaacacacactctctacacaaactaacccagctctc

SEQ ID NO: 7 - protein, 315 aa, Gluconobacter oxydans (GenBank Accession No. BAA32241)
MLACNRAIIARMESPVPLIPQLGAHLVAAGGKRLRPLLTLASARLCGYQPGPDHQRHVGLAACVEFIHTATLLHDDVVDESTLRRGLASANAVFGNKASVLVGDFLFARSFQLMTADGSLKVMAILSDASATIAEGEVLQMVVQNDLTTPVERYLEVIHGKTAALFAAACRVGAVVAERPEAEEEALERFGTNLGMAFQLVDDALDYAADQQVLGKTVGDDMREGKITLPVLAAYEAGSPEDRIFWERVIGEGEQTEDDLPHALNLIAKTGAINTTIARAQVYADAAVEALSIFPDSELRRLLIETVQFTVNRAR

SEQ ID NO: 8 - protein, 332 aa, Sulfitobacter sp. NAS-14.1 (GenBank Accession No. EAP81866)
MTSENTQKPHDRMAAYLNADMTAVNDLIRDRMASEHAPRIPEVTAHLVEAGGKRLRPMLTLAAARLCGYDGPYHVHLAATVEFIHTATLLHDDVVDESAQRRGRPTANLLWDNKSSVLVGDYLFARSFQLMTETNNMRVLAILANASATIAEGEVLQLTAAQNLATDEGIYLQVVRGKTAALFSAATQVGGVIAAAPDAQVQALFDYGDALGIAFQIVDDLLDYQGDPNATGKNIGDDFRERKLTLPVIKAIAKGDATERAFWTRTIEKGKQEDGDLEHALSLLNAHGTLDETKAEALAWAEQAKTALNTLPDHELTQMLRDLADYVVARIS

SEQ ID NO: 9 - protein, 332 aa, Silicibacter pomeroyi DSS-3 (GenBank Accession No. AAV93637)
MDAKVSTKPHEMLAATLSQEMAAVNALIRTRMASEHAPRIPEVTAHLVEAGGKRLRPMLTLAAARLCGYQGEDHVKLAATVEFIHTATLLHDDVVDESGQRRGRPTANLLWDNKSSVLVGDYLFARSFQLMVETGSLRVLDILANAAATIAEGEVLQMTAASDLRTDESVYLQVVRGKTAALFSAATEVGGVIAGVPEAQVRALFEYGDALGIAFQIADDLLDYQGDAKATGKNVGDDFRERKLTLPVIKAVAQATDEERAFWVRTIEKGKQAEGDLEQALALMEKYGTLAATRADAHAWAEKARTALELLPNHEIRTMLSDLADYVVARLS

SEQ ID NO: 10 - protein, 331 aa, Oceanicola batsensis HTCC2597 (GenBank Accession No. EAQ04419)
MDKPVEKPHEAIAALLADDLGAVNALIRERMASRHAPRIPEVTAHLVEAGGKRIRPMLTLAAARLCGYDGPYHIHLAATVEFIHTATLLHDDVVDESAQRRGRPTANLLWDNKSSVLVGDYLFARAFQLMVEPGNLRVLSILSDAAATIAEGEVLQLSAAQDLKTTEETYLQVIRGKTAALFSAATEAGGEIAGASPAQVRALFDYGDALGIAFQMADDLLDWTGKTDSTGKNVGDDFRERKLTLPLIRAVAAADDEERAFWTRTIEKGRQNDEDLATARELLDRHGALGSTRETALDWADRAKSALTHLPDHDLTAHLSDLADYVVERLR

SEQ ID NO: 11 - protein, 338 aa, Rhizobium leguminosarum bv. viciae 3841 (GenBank Accession No. CAK06434)
MGVVIPLEESKNKLASIKPLVDLTRADMERVNQLILSKAGSDVQMIPEVANHLISSGGKRLRPMLTLASASLFDYRGENHIKLATSVEFMHTATLLHDDVVDESDLRRGKSTARMIWGNQASVLVGDFLLGQAFRMMVDVGSLDALDVLSSAACVIAEGEVLQLSVAKNMETTEDDYLSVIRAKTAALFAAAAEVGPIVAEVGRSGRNALKSYGMNLGLAFQLVDDALDYGGKAADLGKNVGDDFREGKITLPVILAYRRGTEDERAFWRDAIEAGNSTDANLEKALGLITKYGTLSDTIGRAIHYGTIARDALAPLPDTVWKSALMEVIDFCIERVN

SEQ ID NO: 12 - protein, 338 aa, Mesorhizobium loti MAFF303099 (GenBank Accession No. BAB53531)
MGVVLNIENGKREPASIKDLIDLTAADMGRVNELILSKAGSDVEMIPEVANHLISSGGKRLRPMLTLAAAQMFGYAGEGHVKLATSVEFMHTATLLHDDVVDESGMRRGKKTARMIWGNQASVLVGDFLLGQAFRMMVDVGSLEALDILSSAASIIAEGEVMQLAAAKNLETTEDEHFAVIKAKTAALFSAAAEVGPVIAQATRNDRAALRSYGMNLGLAFQLIDDALDYGGTSKDLGKNVGDDFREGKVTLPVILAYRRGTKAERTFWKRAIEDNVVDDAGLEKAIGLMTRHGAIADTIGRARHFGEIARDALAPLEETRQKSALIDVIDFCISRVN

SEQ ID NO: 13 - protein, 338 aa, Agrobacterium tumefaciens str. C58 (GenBank Accession No. AAL41650)
MGVVIPLEESKNKLASVKPLVDLTRPDMERVNQLILSRAGSDVQMIPEVANHLISSGGKRLRPMLTLASASMFGYEGDNHIKLATSVEFMHTATLLHDDVVDESDLRRGKSTARTIWGNQASVLVGDFLLGQAFRMMVDVGSLDALDVLSTAASVIAEGEVLQLSVAKNMETTEDDYLQVIRAKTAALFAAAAEVGPIVAKTDKASRSALKSYGMNLGLAFQLVDDVLDYGGKSADLGKNTGDDFREGKITLPVILSYRRGTQDERAFWRNAIEKGESSDENLEKALGLITKYNGLGDTIGRATHYGTIARDALAPLPQSPWKNALLEVIDFCIERLN

SEQ ID NO: 14 - protein, 333 aa, Roseovarius sp. 217 (GenBank Accession No. EAQ24568)
MGLDEIATKPHEQLAAHLATKMEAVNVLIRERMASRHAPRIPQVTAHLVEAGGKRLRPMLVLATADLCGYDGPFDVHLAATVEFIHTATLLHDDVVDESAQRRGRPTANLLWDNKSSVLVGDYLFARAFQLMVEPGSLRVLDILSNASATIAEGEVLQLSAAQDLATTEDIYLQVVRGKTAALFSAATEVGGVIAGAPEDHVKALFEYGDALGIAFQIVDDLLDYQGDVKSTGKNVGDDFRERKLTLPVIKAVAAASAEERAFWKRTIEKGDQRDGDLEHALTLMQAHGALEQTRAEALDWAARARAAIAVLPDHPVQRMLDNLAGYVVARIS

SEQ ID NO: 15 - protein, 336 aa, Rhodopseudomonas palustris BisB18 (GenBank Accession No. ABD89877)
MAVIVPFEGPPTASIDQLVELVAADMERVNAVILSRTGSEVTMIPEVANHLISSGGKRLRPNLTLAMAQLTGYSGEGHIKLAAAVEFMHTATLLHDDVVDESEMRRGKKSARMLWGNEASVLVGDFLLGQAFRMMVEVGSLRALDILSSAAATIAEGEVMQLAAAKNTATTEDEYLAVIRGKTAELFAAACEVGPAIAGRPKAEQSACRSFGMNLGIAFQLVDDVLDYGGKAAKLGKNVGDDFREGKITLPVVLAFRRGNDAERAFWIKALERGEITEPDLDQAIGLMTKHRALEDTIQRAHHYGAMAVDALALFPTSPMKAALEQVVAFCLARSH

SEQ ID NO: 16 - protein, 397 aa, Yarrowia lipolytica (GenBank Accession No. XP_505040)
MLALRLARVVRPTGASIRHLTWSHPARLYSSVDKVNLPKAPSKEELKTPVPDELLEEVKVLENTPLEPVDPEKATIDLKTQFQAAREAELAAMTLPERFVYSLPKSMIPYARLMRMEKPVGTWLLFNPGVWSIGMAAYMSHAAVAPTLYTLSLFGIGAFIMRSAGCTINDILDRKLDAQVARTFDRPIAAGDVSVKQAVAFLGAQCAAGLGILMLLPMNCWWLGALSMPFVMTYPLFKRFTYYPQAILSLCFTWAALLGPPAMGVWCWPVMLSLWGSNFLWCMVYDTIYAHQDKVFDVEAGIKSTALAWGDNSKSIMTVLTLGQLGLLFGAGVYADMGPGFYSAFTWVSYRLGKMIKTVDLDDPVDCGKHFRSNINTGHIMSAGILADWGMRLAGFY

SEQ ID NO: 17 - DNA, 1168 bp, Artificial Sequence
  Fusion of GenBank Accession No. XP_505040 (N-terminus of Yarrowia lipolytica  ppt1 gene encoding p-hydroxybenzoate:polyprenyl transferase) and GenBank Accession No. BAA32241 (Gluconobacter oxydans ddsA)
ccatggtagcgttgagactggctcgagtcgtgcgaccgacaggagcctcgatccgtcacttgacatggtcccaccctgctcgactctattcgtccgtcgacaaggtgaatctgcccaaggctccctccaaggaggagctcaagactcccgtggttcagggtgcaggaggtgagtctgctctctccgctctctctacctaccttgaggaagacatgcttgcctgtaatcgagccatcattgctcgaatggagtctcctgttcccctcatccctcagctgggtgctcaccttgtcgctgctggtggtaagcgactccgacctctccttacactcgcatctgcccgactctgtggctaccagccaggtcctgatcatcagcgacatgtcggtctcgctgcctgtgttgagttcatccacacggccaccctcctccatgacgacgttgtggatgagtctactctgcgacgaggactggcctctgccaacgctgtcttcggcaacaaagcctctgttctcgttggtgactttctcttcgctcgatctttccagctgatgactgccgacggaagcctcaaggttatggccatcctctcggatgcctccgctaccatagctgagggtgaagtccttcagatggtcgttcagaacgaccttaccacaccagtcgagcgatacctcgaggttatccacggcaagacagctgcactcttcgcagctgcttgccgagttggagcagtcgttgccgaacgacctgaggctgaggaagaggctcttgagcgattcggaaccaacctgggaatggccttccagctggttgatgacgctctggattacgctgccgaccaacaggtgctcggaaagaccgtcggtgacgacatgcgagagggaaagatcactctgccagtgctggctgcctacgaggctggatctccagaggaccggatcttctgggagcgagtgataggtgaaggagagcagactgaggacgatctccctcacgctcttaacctcatcgccaagactggtgccatcaacacaacgattgctcgagcccaggtctacgccgacgcagctgtcgaggctctctctatcttccctgactccgagctccgacgactgctgatcgagacagttcagttcaccgtcaaccgagctcgatagcggccgca

SEQ ID NO: 18 - protein, 385 aa, Artificial Sequence
  Fusion of GenBank Accession No. XP_505040 (N-terminus of Yarrowia lipolytica  ppt1 gene encoding p-hydroxybenzoate:polyprenyl transferase) and GenBank Accession No. BAA32241 (Gluconobacter oxydans ddsA)
MVALRLARVVRPTGASIRHLTWSHPARLYSSVDKVNLPKAPSKEELKTPVVQGAGGESALSALSTYLEEDMLACNRAIIARMESPVPLIPQLGAHLVAAGGKRLRPLLTLASARLCGYQPGPDHQRHVGLAACVEFIHTATLLHDDVVDESTLRRGLASANAVFGNKASVLVGDFLFARSFQLMTADGSLKVMAILSDASATIAEGEVLQMVVQNDLTTPVERYLEVIHGKTAALFAAACRVGAVVAERPEAEEEALERFGTNLGMAFQLVDDALDYAADQQVLGKTVGDDMREGKITLPVLAAYEAGSPEDRIFWERVIGEGEQTEDDLPHALNLIAKTGAINTTIARAQVYADAAVEALSIFPDSELRRLLIETVQFTVNRAR

SEQ ID NO: 19 - DNA, 8231 bp, Artificial Sequence
  Plasmid pDMW359-Ss_ddsA
catggtagcgttgagactggctcgagtcgtgcgaccgacaggagcctcgatccgtcacttgacatggtcccaccctgctcgactctattcgtccgtcgacaaggtgaatctgcccaaggctccctccaaggaggagctcaagactatgacttctgagaacacccagaagcctcacgaccgaatggctgcctacctgaacgccgacatgactgctgtcaacgacctcatccgagatcgaatggcctctgagcacgctcctcgaatccctgaggtcaccgctcatctggttgaagcaggtggtaagcgactccgacccatgctgactctggctgcagcccgactgtgtggctacgatggtccctaccatgtgcacctcgctgccacagtcgagttcatccatactgccacactccttcacgacgatgttgtcgacgagtctgcccagagacgaggccgacccacagccaaccttctctgggacaacaagtcgtccgtcctggttggtgactacctcttcgctcgatctttccagctcatgaccgagaccaacaacatgcgagtcctcgctatcctggctaacgcttctgccaccatcgccgaaggtgaggtgcttcagctcactgctgcccagaacctggccactgatgaaggcatctacctccaggtcgttcgaggcaagactgctgccctgttctctgcagccactcaggtcggaggcgtcatagctgctgcacccgacgcccaggtccaggctctcttcgattacggtgatgcccttggtatcgctttccagatcgtcgacgatctgctcgactaccagggagaccctaacgccactggcaagaacatcggagatgacttccgagagcgaaagctgactctccctgtgatcaaggccatcgctaagggagatgctacagagcgagccttctggactcgaaccatcgagaagggcaagcaggaggatggtgacctcgaacatgccctgtctctgctcaacgctcatggcactctcgacgagaccaaggctgaagccctcgcttgggctgaacaggccaagacagccctgaatacccttcccgatcacgaactgacccagatgctgcgagaccttgctgactacgtcgttgctcgaatctcctaagcggccgcaagtgtggatggggaagtgagtgcccggttctgtgtgcacaattggcaatccaagatggatggattcaacacagggatatagcgagctacgtggtggtgcgaggatatagcaacggatatttatgtttgacacttgagaatgtacgatacaagcactgtccaagtacaatactaaacatactgtacatactcatactcgtacccgggcaacggtttcacttgagtgcagtggctagtgctcttactcgtacagtgtgcaatactgcgtatcatagtctttgatgtatatcgtattcattcatgttagttgcgtacgagccggaagcataaagtgtaaagcctggggtgcctaatgagtgagctaactcacattaattgcgttgcgctcactgcccgctttccagtcgggaaacctgtcgtgccagctgcattaatgaatcggccaacgcgcggggagaggcggtttgcgtattgggcgctcttccgcttcctcgctcactgactcgctgcgctcggtcgttcggctgcggcgagcggtatcagctcactcaaaggcggtaatacggttatccacagaatcaggggataacgcaggaaagaacatgtgagcaaaaggccagcaaaaggccaggaaccgtaaaaaggccgcgttgctggcgtttttccataggctccgcccccctgacgagcatcacaaaaatcgacgctcaagtcagaggtggcgaaacccgacaggactataaagataccaggcgtttccccctggaagctccctcgtgcgctctcctgttccgaccctgccgcttaccggatacctgtccgcctttctcccttcgggaagcgtggcgctttctcatagctcacgctgtaggtatctcagttcggtgtaggtcgttcgctccaagctgggctgtgtgcacgaaccccccgttcagcccgaccgctgcgccttatccggtaactatcgtcttgagtccaacccggtaagacacgacttatcgccactggcagcagccactggtaacaggattagcagagcgaggtatgtaggcggtgctacagagttcttgaagtggtggcctaactacggctacactagaaggacagtatttggtatctgcgctctgctgaagccagttaccttcggaaaaagagttggtagctcttgatccggcaaacaaaccaccgctggtagcggtggtttttttgtttgcaagcagcagattacgcgcagaaaaaaaggatctcaagaagatcctttgatcttttctacggggtctgacgctcagtggaacgaaaactcacgttaagggattttggtcatgagattatcaaaaaggatcttcacctagatccttttaaattaaaaatgaagttttaaatcaatctaaagtatatatgagtaaacttggtctgacagttaccaatgcttaatcagtgaggcacctatctcagcgatctgtctatttcgttcatccatagttgcctgactccccgtcgtgtagataactacgatacgggagggcttaccatctggccccagtgctgcaatgataccgcgagacccacgctcaccggctccagatttatcagcaataaaccagccagccggaagggccgagcgcagaagtggtcctgcaactttatccgcctccatccagtctattaattgttgccgggaagctagagtaagtagttcgccagttaatagtttgcgcaacgttgttgccattgctacaggcatcgtggtgtcacgctcgtcgtttggtatggcttcattcagctccggttcccaacgatcaaggcgagttacatgatcccccatgttgtgcaaaaaagcggttagctccttcggtcctccgatcgttgtcagaagtaagttggccgcagtgttatcactcatggttatggcagcactgcataattctcttactgtcatgccatccgtaagatgcttttctgtgactggtgagtactcaaccaagtcattctgagaatagtgtatgcggcgaccgagttgctcttgcccggcgtcaatacgggataataccgcgccacatagcagaactttaaaagtgctcatcattggaaaacgttcttcggggcgaaaactctcaaggatcttaccgctgttgagatccagttcgatgtaacccactcgtgcacccaactgatcttcagcatcttttactttcaccagcgtttctgggtgagcaaaaacaggaaggcaaaatgccgcaaaaaagggaataagggcgacacggaaatgttgaatactcatactcttcctttttcaatattattgaagcatttatcagggttattgtctcatgagcggatacatatttgaatgtatttagaaaaataaacaaataggggttccgcgcacatttccccgaaaagtgccacctgacgcgccctgtagcggcgcattaagcgcggcgggtgtggtggttacgcgcagcgtgaccgctacacttgccagcgccctagcgcccgctcctttcgctttcttcccttcctttctcgccacgttcgccggctttccccgtcaagctctaaatcgggggctccctttagggttccgatttagtgctttacggcacctcgaccccaaaaaacttgattagggtgatggttcacgtagtgggccatcgccctgatagacggtttttcgccctttgacgttggagtccacgttctttaatagtggactcttgttccaaactggaacaacactcaaccctatctcggtctattcttttgatttataagggattttgccgatttcggcctattggttaaaaaatgagctgatttaacaaaaatttaacgcgaattttaacaaaatattaacgcttacaatttccattcgccattcaggctgcgcaactgttgggaagggcgatcggtgcgggcctcttcgctattacgccagctggcgaaagggggatgtgctgcaaggcgattaagttgggtaacgccagggttttcccagtcacgacgttgtaaaacgacggccagtgaattgtaatacgactcactatagggcgaattgggtaccgggccccccctcgaggtcgatggtgtcgataagcttgatatcgaattcatgtcacacaaaccgatcttcgcctcaaggaaacctaattctacatccgagagactgccgagatccagtctacactgattaattttcgggccaataatttaaaaaaatcgtgttatataatattatatgtattatatatatacatcatgatgatactgacagtcatgtcccattgctaaatagacagactccatctgccgcctccaactgatgttctcaatatttaaggggtcatctcgcattgtttaataataaacagactccatctaccgcctccaaatgatgttctcaaaatatattgtatgaacttatttttattacttagtattattagacaacttacttgctttatgaaaaacacttcctatttaggaaacaatttataatggcagttcgttcatttaacaatttatgtagaataaatgttataaatgcgtatgggaaatcttaaatatggatagcataaatgatatctgcattgcctaattcgaaatcaacagcaacgaaaaaaatcccttgtacaacataaatagtcatcgagaaatatcaactatcaaagaacagctattcacacgttactattgagattattattggacgagaatcacacactcaactgtctttctctcttctagaaatacaggtacaagtatgtactattctcattgttcatacttctagtcatttcatcccacatattccttggatttctctccaatgaatgacattctatcttgcaaattcaacaattataataagatataccaaagtagcggtatagtggcaatcaaaaagcttctctggtgtgcttctcgtatttatttttattctaatgatccattaaaggtatatatttatttcttgttatataatccttttgtttattacatgggctggatacataaaggtattttgatttaattttttgcttaaattcaatcccccctcgttcagtgtcaactgtaatggtaggaaattaccatacttttgaagaagcaaaaaaaatgaaagaaaaaaaaaatcgtatttccaggttagacgttccgcagaatctagaatgcggtatgcggtacattgttcttcgaacgtaaaagttgcgctccctgagatattgtacatttttgcttttacaagtacaagtacatcgtacaactatgtactactgttgatgcatccacaacagtttgttttgtttttttttgttttttttttttctaatgattcattaccgctatgtatacctacttgtacttgtagtaagccgggttattggcgttcaattaatcatagacttatgaatctgcacggtgtgcgctgcgagttacttttagcttatgcatgctacttgggtgtaatattgggatctgttcggaaatcaacggatgctcaatcgatttcgacagtaattaattaagtcatacacaagtcagctttcttcgagcctcatataagtataagtagttcaacgtattagcactgtacccagcatctccgtatcgagaaacacaacaacatgccccattggacagatcatgcggatacacaggttgtgcagtatcatacatactcgatcagacaggtcgtctgaccatcatacaagctgaacaagcgctccatacttgcacgctctctatatacacagttaaattacatatccatagtctaacctctaacagttaatcttctggtaagcctcccagccagccttctggtatcgcttggcctcctcaataggatctcggttctggccgtacagacctcggccgacaattatgatatccgttccggtagacatgacatcctcaacagttcggtactgctgtccgagagcgtctcccttgtcgtcaagacccaccccgggggtcagaataagccagtcctcagagtcgcccttaggtcggttctgggcaatgaagccaaccacaaactcggggtcggatcgggcaagctcaatggtctgcttggagtactcgccagtggccagagagcccttgcaagacagctcggccagcatgagcagacctctggccagcttctcgttgggagaggggactaggaactccttgtactgggagttctcgtagtcagagacgtcctccttcttctgttcagagacagtttcctcggcaccagctcgcaggccagcaatgattccggttccgggtacaccgtgggcgttggtgatatcggaccactcggcgattcggtgacaccggtactggtgcttgacagtgttgccaatatctgcgaactttctgtcctcgaacaggaagaaaccgtgcttaagagcaagttccttgagggggagcacagtgccggcgtaggtgaagtcgtcaatgatgtcgatatgggttttgatcatgcacacataaggtccgaccttatcggcaagctcaatgagctccttggtggtggtaacatccagagaagcacacaggttggttttcttggctgccacgagcttgagcactcgagcggcaaaggcggacttgtggacgttagctcgagcttcgtaggagggcattttggtggtgaagaggagactgaaataaatttagtctgcagaactttttatcggaaccttatctggggcagtgaagtatatgttatggtaatagttacgagttagttgaacttatagatagactggactatacggctatcggtccaaattagaaagaacgtcaatggctctctgggcgtcgcctttgccgacaaaaatgtgatcatgatgaaagccagcaatgacgttgcagctgatattgttgtcggccaaccgcgccgaaaacgcagctgtcagacccacagcctccaacgaagaatgtatcgtcaaagtgatccaagcacactcatagttggagtcgtactccaaaggcggcaatgacgagtcagacagatactcgtcgactcaggcgacgacggaattcctgcagcccatctgcagaattcaggagagaccgggttggcggcgtatttgtgtcccaaaaaacagccccaattgccccggagaagacggccaggccgcctagatgacaaattcaacaactcacagctgactttctgccattgccactaggggggggcctttttatatggccaagccaagctctccacgtcggttgggctgcacccaacaataaatgggtagggttgcaccaacaaagggatgggatggggggtagaagatacgaggataacggggctcaatggcacaaataagaacgaatactgccattaagactcgtgatccagcgactgacaccattgcatcatctaagggcctcaaaactacctcggaactgctgcgctgatctggacaccacagaggttccgagcactttaggttgcaccaaatgtcccaccaggtgcaggcagaaaacgctggaacagcgtgtacagtttgtcttaacaaaaagtgagggcgctgaggtcgagcagggtggtgtgacttgttatagcctttagagctgcgaaagcgcgtatggatttggctcatcaggccagattgagggtctgtggacacatgtcatgttagtgtacttcaatcgccccctggatatagccccgacaataggccgtggcctcatttttttgccttccgcacatttccattgctcggtacccacaccttgcttctcctgcacttgccaaccttaatactggtttacattgaccaacatcttacaagcggggggcttgtctagggtatatataaacagtggctctcccaatcggttgccagtctcttttttcctttctttccccacagattcgaaatctaaactacacatcacacaatgcctgttactgacgtccttaagcgaaagtccggtgtcatcgtcggcgacgatgtccgagccgtgagtatccacgacaagatcagtgtcgagacgacgcgttttgtgtaatgacacaatccgaaagtcgctagcaacacacactctctacacaaactaacccagctctc

SEQ ID NO: 20 - DNA, 1153 bp, Artificial Sequence
  Fusion of GenBank Accession No. XP_505040 (N-terminus of Yarrowia lipolytica  ppt1 gene encoding p-hydroxybenzoate:polyprenyl transferase) and GenBank Accession No. EAP81866 (Sulfitobacter sp. NAS-14.1 ddsA)
ccatggtagcgttgagactggctcgagtcgtgcgaccgacaggagcctcgatccgtcacttgacatggtcccaccctgctcgactctattcgtccgtcgacaaggtgaatctgcccaaggctccctccaaggaggagctcaagactatgacttctgagaacacccagaagcctcacgaccgaatggctgcctacctgaacgccgacatgactgctgtcaacgacctcatccgagatcgaatggcctctgagcacgctcctcgaatccctgaggtcaccgctcatctggttgaagcaggtggtaagcgactccgacccatgctgactctggctgcagcccgactgtgtggctacgatggtccctaccatgtgcacctcgctgccacagtcgagttcatccatactgccacactccttcacgacgatgttgtcgacgagtctgcccagagacgaggccgacccacagccaaccttctctgggacaacaagtcgtccgtcctggttggtgactacctcttcgctcgatctttccagctcatgaccgagaccaacaacatgcgagtcctcgctatcctggctaacgcttctgccaccatcgccgaaggtgaggtgcttcagctcactgctgcccagaacctggccactgatgaaggcatctacctccaggtcgttcgaggcaagactgctgccctgttctctgcagccactcaggtcggaggcgtcatagctgctgcacccgacgcccaggtccaggctctcttcgattacggtgatgcccttggtatcgctttccagatcgtcgacgatctgctcgactaccagggagaccctaacgccactggcaagaacatcggagatgacttccgagagcgaaagctgactctccctgtgatcaaggccatcgctaagggagatgctacagagcgagccttctggactcgaaccatcgagaagggcaagcaggaggatggtgacctcgaacatgccctgtctctgctcaacgctcatggcactctcgacgagaccaaggctgaagccctcgcttgggctgaacaggccaagacagccctgaatacccttcccgatcacgaactgacccagatgctgcgagaccttgctgactacgtcgttgctcgaatctcctaagcggccgc

SEQ ID NO: 21 - protein, 380 aa, Artificial Sequence
  Fusion of GenBank Accession No. XP_505040 (N-terminus of Yarrowia lipolytica  ppt1 gene encoding p-hydroxybenzoate:polyprenyl transferase) and GenBank Accession No. EAP81866 (Sulfitobacter sp. NAS-14.1 ddsA)
MVALRLARVVRPTGASIRHLTWSHPARLYSSVDKVNLPKAPSKEELKTMTSENTQKPHDRMAAYLNADMTAVNDLIRDRMASEHAPRIPEVTAHLVEAGGKRLRPMLTLAAARLCGYDGPYHVHLAATVEFIHTATLLHDDVVDESAQRRGRPTANLLWDNKSSVLVGDYLFARSFQLMTETNNMRVLAILANASATIAEGEVLQLTAAQNLATDEGIYLQVVRGKTAALFSAATQVGGVIAAAPDAQVQALFDYGDALGIAFQIVDDLLDYQGDPNATGKNIGDDFRERKLTLPVIKAIAKGDATERAFWTRTIEKGKQEDGDLEHALSLLNAHGTLDETKAEALAWAEQAKTALNTLPDHELTQMLRDLADYVVARIS

SEQ ID NO: 22 - DNA, 8231 bp, Artificial Sequence
  Plasmid pDMW359-Sp_ddsA
catggtagcgttgagactggctcgagtcgtgcgaccgacaggagcctcgatccgtcacttgacatggtcccaccctgctcgactctattcgtccgtcgacaaggtgaatctgcccaaggctccctccaaggaggagctcaagactatggacgccaaggtgtccaccaagcctcatgagatgctggctgccactctgtctcaggagatggctgccgtcaacgctctcatccgaacccgaatggcctctgagcacgctcctcgaatccctgaggttactgcccatcttgtggaggctggtggcaagcgacttcgacccatgctgacccttgctgcagctcgactctgtggataccagggtgaggaccacgtcaagctggctgccacagtcgagttcatccataccgctacactgctccatgatgacgtcgttgacgagtctggtcagagacgaggccgacctactgccaacctcctgtgggacaacaagtcttccgtccttgtgggcgactacctgttcgctcgatccttccagctcatggtcgagactggatctctccgagttctcgacatcctcgccaatgctgcagctaccatcgctgaaggtgaggttctgcagatgactgctgcctctgacctccgaactgacgagtccgtgtacctccaggtcgttcgaggcaagacagctgccctgttctctgctgccaccgaggttggaggtgtcatcgctggagttcccgaggctcaggtccgagctctgttcgagtacggagacgctctgggtatcgccttccagatcgctgatgacctgctcgactaccagggtgatgccaaggctactggcaagaacgtcggtgacgacttccgagagcgaaagctgactctgcctgtcatcaaggctgtcgcacaggccaccgacgaggaacgagccttctgggtccgaacaatcgagaagggtaagcaggctgagggagacctggagcaggctctcgcactcatggagaagtacggaaccctcgcagccactcgagctgatgctcatgcctgggctgagaaggctcgaaccgctctcgagctgctgcccaaccatgagatccgaaccatgctgtccgaccttgccgactacgttgtcgctcgactgtcttaggcggccgcaagtgtggatggggaagtgagtgcccggttctgtgtgcacaattggcaatccaagatggatggattcaacacagggatatagcgagctacgtggtggtgcgaggatatagcaacggatatttatgtttgacacttgagaatgtacgatacaagcactgtccaagtacaatactaaacatactgtacatactcatactcgtacccgggcaacggtttcacttgagtgcagtggctagtgctcttactcgtacagtgtgcaatactgcgtatcatagtctttgatgtatatcgtattcattcatgttagttgcgtacgagccggaagcataaagtgtaaagcctggggtgcctaatgagtgagctaactcacattaattgcgttgcgctcactgcccgctttccagtcgggaaacctgtcgtgccagctgcattaatgaatcggccaacgcgcggggagaggcggtttgcgtattgggcgctcttccgcttcctcgctcactgactcgctgcgctcggtcgttcggctgcggcgagcggtatcagctcactcaaaggcggtaatacggttatccacagaatcaggggataacgcaggaaagaacatgtgagcaaaaggccagcaaaaggccaggaaccgtaaaaaggccgcgttgctggcgtttttccataggctccgcccccctgacgagcatcacaaaaatcgacgctcaagtcagaggtggcgaaacccgacaggactataaagataccaggcgtttccccctggaagctccctcgtgcgctctcctgttccgaccctgccgcttaccggatacctgtccgcctttctcccttcgggaagcgtggcgctttctcatagctcacgctgtaggtatctcagttcggtgtaggtcgttcgctccaagctgggctgtgtgcacgaaccccccgttcagcccgaccgctgcgccttatccggtaactatcgtcttgagtccaacccggtaagacacgacttatcgccactggcagcagccactggtaacaggattagcagagcgaggtatgtaggcggtgctacagagttcttgaagtggtggcctaactacggctacactagaaggacagtatttggtatctgcgctctgctgaagccagttaccttcggaaaaagagttggtagctcttgatccggcaaacaaaccaccgctggtagcggtggtttttttgtttgcaagcagcagattacgcgcagaaaaaaaggatctcaagaagatcctttgatcttttctacggggtctgacgctcagtggaacgaaaactcacgttaagggattttggtcatgagattatcaaaaaggatcttcacctagatccttttaaattaaaaatgaagttttaaatcaatctaaagtatatatgagtaaacttggtctgacagttaccaatgcttaatcagtgaggcacctatctcagcgatctgtctatttcgttcatccatagttgcctgactccccgtcgtgtagataactacgatacgggagggcttaccatctggccccagtgctgcaatgataccgcgagacccacgctcaccggctccagatttatcagcaataaaccagccagccggaagggccgagcgcagaagtggtcctgcaactttatccgcctccatccagtctattaattgttgccgggaagctagagtaagtagttcgccagttaatagtttgcgcaacgttgttgccattgctacaggcatcgtggtgtcacgctcgtcgtttggtatggcttcattcagctccggttcccaacgatcaaggcgagttacatgatcccccatgttgtgcaaaaaagcggttagctccttcggtcctccgatcgttgtcagaagtaagttggccgcagtgttatcactcatggttatggcagcactgcataattctcttactgtcatgccatccgtaagatgcttttctgtgactggtgagtactcaaccaagtcattctgagaatagtgtatgcggcgaccgagttgctcttgcccggcgtcaatacgggataataccgcgccacatagcagaactttaaaagtgctcatcattggaaaacgttcttcggggcgaaaactctcaaggatcttaccgctgttgagatccagttcgatgtaacccactcgtgcacccaactgatcttcagcatcttttactttcaccagcgtttctgggtgagcaaaaacaggaaggcaaaatgccgcaaaaaagggaataagggcgacacggaaatgttgaatactcatactcttcctttttcaatattattgaagcatttatcagggttattgtctcatgagcggatacatatttgaatgtatttagaaaaataaacaaataggggttccgcgcacatttccccgaaaagtgccacctgacgcgccctgtagcggcgcattaagcgcggcgggtgtggtggttacgcgcagcgtgaccgctacacttgccagcgccctagcgcccgctcctttcgctttcttcccttcctttctcgccacgttcgccggctttccccgtcaagctctaaatcgggggctccctttagggttccgatttagtgctttacggcacctcgaccccaaaaaacttgattagggtgatggttcacgtagtgggccatcgccctgatagacggtttttcgccctttgacgttggagtccacgttctttaatagtggactcttgttccaaactggaacaacactcaaccctatctcggtctattcttttgatttataagggattttgccgatttcggcctattggttaaaaaatgagctgatttaacaaaaatttaacgcgaattttaacaaaatattaacgcttacaatttccattcgccattcaggctgcgcaactgttgggaagggcgatcggtgcgggcctcttcgctattacgccagctggcgaaagggggatgtgctgcaaggcgattaagttgggtaacgccagggttttcccagtcacgacgttgtaaaacgacggccagtgaattgtaatacgactcactatagggcgaattgggtaccgggccccccctcgaggtcgatggtgtcgataagcttgatatcgaattcatgtcacacaaaccgatcttcgcctcaaggaaacctaattctacatccgagagactgccgagatccagtctacactgattaattttcgggccaataatttaaaaaaatcgtgttatataatattatatgtattatatatatacatcatgatgatactgacagtcatgtcccattgctaaatagacagactccatctgccgcctccaactgatgttctcaatatttaaggggtcatctcgcattgtttaataataaacagactccatctaccgcctccaaatgatgttctcaaaatatattgtatgaacttatttttattacttagtattattagacaacttacttgctttatgaaaaacacttcctatttaggaaacaatttataatggcagttcgttcatttaacaatttatgtagaataaatgttataaatgcgtatgggaaatcttaaatatggatagcataaatgatatctgcattgcctaattcgaaatcaacagcaacgaaaaaaatcccttgtacaacataaatagtcatcgagaaatatcaactatcaaagaacagctattcacacgttactattgagattattattggacgagaatcacacactcaactgtctttctctcttctagaaatacaggtacaagtatgtactattctcattgttcatacttctagtcatttcatcccacatattccttggatttctctccaatgaatgacattctatcttgcaaattcaacaattataataagatataccaaagtagcggtatagtggcaatcaaaaagcttctctggtgtgcttctcgtatttatttttattctaatgatccattaaaggtatatatttatttcttgttatataatccttttgtttattacatgggctggatacataaaggtattttgatttaattttttgcttaaattcaatcccccctcgttcagtgtcaactgtaatggtaggaaattaccatacttttgaagaagcaaaaaaaatgaaagaaaaaaaaaatcgtatttccaggttagacgttccgcagaatctagaatgcggtatgcggtacattgttcttcgaacgtaaaagttgcgctccctgagatattgtacatttttgcttttacaagtacaagtacatcgtacaactatgtactactgttgatgcatccacaacagtttgttttgtttttttttgttttttttttttctaatgattcattaccgctatgtatacctacttgtacttgtagtaagccgggttattggcgttcaattaatcatagacttatgaatctgcacggtgtgcgctgcgagttacttttagcttatgcatgctacttgggtgtaatattgggatctgttcggaaatcaacggatgctcaatcgatttcgacagtaattaattaagtcatacacaagtcagctttcttcgagcctcatataagtataagtagttcaacgtattagcactgtacccagcatctccgtatcgagaaacacaacaacatgccccattggacagatcatgcggatacacaggttgtgcagtatcatacatactcgatcagacaggtcgtctgaccatcatacaagctgaacaagcgctccatacttgcacgctctctatatacacagttaaattacatatccatagtctaacctctaacagttaatcttctggtaagcctcccagccagccttctggtatcgcttggcctcctcaataggatctcggttctggccgtacagacctcggccgacaattatgatatccgttccggtagacatgacatcctcaacagttcggtactgctgtccgagagcgtctcccttgtcgtcaagacccaccccgggggtcagaataagccagtcctcagagtcgcccttaggtcggttctgggcaatgaagccaaccacaaactcggggtcggatcgggcaagctcaatggtctgcttggagtactcgccagtggccagagagcccttgcaagacagctcggccagcatgagcagacctctggccagcttctcgttgggagaggggactaggaactccttgtactgggagttctcgtagtcagagacgtcctccttcttctgttcagagacagtttcctcggcaccagctcgcaggccagcaatgattccggttccgggtacaccgtgggcgttggtgatatcggaccactcggcgattcggtgacaccggtactggtgcttgacagtgttgccaatatctgcgaactttctgtcctcgaacaggaagaaaccgtgcttaagagcaagttccttgagggggagcacagtgccggcgtaggtgaagtcgtcaatgatgtcgatatgggttttgatcatgcacacataaggtccgaccttatcggcaagctcaatgagctccttggtggtggtaacatccagagaagcacacaggttggttttcttggctgccacgagcttgagcactcgagcggcaaaggcggacttgtggacgttagctcgagcttcgtaggagggcattttggtggtgaagaggagactgaaataaatttagtctgcagaactttttatcggaaccttatctggggcagtgaagtatatgttatggtaatagttacgagttagttgaacttatagatagactggactatacggctatcggtccaaattagaaagaacgtcaatggctctctgggcgtcgcctttgccgacaaaaatgtgatcatgatgaaagccagcaatgacgttgcagctgatattgttgtcggccaaccgcgccgaaaacgcagctgtcagacccacagcctccaacgaagaatgtatcgtcaaagtgatccaagcacactcatagttggagtcgtactccaaaggcggcaatgacgagtcagacagatactcgtcgactcaggcgacgacggaattcctgcagcccatctgcagaattcaggagagaccgggttggcggcgtatttgtgtcccaaaaaacagccccaattgccccggagaagacggccaggccgcctagatgacaaattcaacaactcacagctgactttctgccattgccactaggggggggcctttttatatggccaagccaagctctccacgtcggttgggctgcacccaacaataaatgggtagggttgcaccaacaaagggatgggatggggggtagaagatacgaggataacggggctcaatggcacaaataagaacgaatactgccattaagactcgtgatccagcgactgacaccattgcatcatctaagggcctcaaaactacctcggaactgctgcgctgatctggacaccacagaggttccgagcactttaggttgcaccaaatgtcccaccaggtgcaggcagaaaacgctggaacagcgtgtacagtttgtcttaacaaaaagtgagggcgctgaggtcgagcagggtggtgtgacttgttatagcctttagagctgcgaaagcgcgtatggatttggctcatcaggccagattgagggtctgtggacacatgtcatgttagtgtacttcaatcgccccctggatatagccccgacaataggccgtggcctcatttttttgccttccgcacatttccattgctcggtacccacaccttgcttctcctgcacttgccaaccttaatactggtttacattgaccaacatcttacaagcggggggcttgtctagggtatatataaacagtggctctcccaatcggttgccagtctcttttttcctttctttccccacagattcgaaatctaaactacacatcacacaatgcctgttactgacgtccttaagcgaaagtccggtgtcatcgtcggcgacgatgtccgagccgtgagtatccacgacaagatcagtgtcgagacgacgcgttttgtgtaatgacacaatccgaaagtcgctagcaacacacactctctacacaaactaacccagctctc

SEQ ID NO: 23 - DNA, 1153 bp, Artificial Sequence
  Fusion of GenBank Accession No. XP_505040 (N-terminus of Yarrowia lipolytica  ppt1 gene encoding p-hydroxybenzoate:polyprenyl transferase) and GenBank Accession No. AAV93637 (Silicibacter pomeroyi DSS-3 ddsA)
ccatggtagcgttgagactggctcgagtcgtgcgaccgacaggagcctcgatccgtcacttgacatggtcccaccctgctcgactctattcgtccgtcgacaaggtgaatctgcccaaggctccctccaaggaggagctcaagactatggacgccaaggtgtccaccaagcctcatgagatgctggctgccactctgtctcaggagatggctgccgtcaacgctctcatccgaacccgaatggcctctgagcacgctcctcgaatccctgaggttactgcccatcttgtggaggctggtggcaagcgacttcgacccatgctgacccttgctgcagctcgactctgtggataccagggtgaggaccacgtcaagctggctgccacagtcgagttcatccataccgctacactgctccatgatgacgtcgttgacgagtctggtcagagacgaggccgacctactgccaacctcctgtgggacaacaagtcttccgtccttgtgggcgactacctgttcgctcgatccttccagctcatggtcgagactggatctctccgagttctcgacatcctcgccaatgctgcagctaccatcgctgaaggtgaggttctgcagatgactgctgcctctgacctccgaactgacgagtccgtgtacctccaggtcgttcgaggcaagacagctgccctgttctctgctgccaccgaggttggaggtgtcatcgctggagttcccgaggctcaggtccgagctctgttcgagtacggagacgctctgggtatcgccttccagatcgctgatgacctgctcgactaccagggtgatgccaaggctactggcaagaacgtcggtgacgacttccgagagcgaaagctgactctgcctgtcatcaaggctgtcgcacaggccaccgacgaggaacgagccttctgggtccgaacaatcgagaagggtaagcaggctgagggagacctggagcaggctctcgcactcatggagaagtacggaaccctcgcagccactcgagctgatgctcatgcctgggctgagaaggctcgaaccgctctcgagctgctgcccaaccatgagatccgaaccatgctgtccgaccttgccgactacgttgtcgctcgactgtcttaggcggccgc

SEQ ID NO: 24 - protein, 380 aa, Artificial Sequence
  Fusion of GenBank Accession No. XP_505040 (N-terminus of Yarrowia lipolytica  ppt1 gene encoding p-hydroxybenzoate:polyprenyl transferase) and GenBank Accession No. AAV93637 (Silicibacter pomeroyi DSS-3 ddsA)
MVALRLARVVRPTGASIRHLTWSHPARLYSSVDKVNLPKAPSKEELKTMDAKVSTKPHEMLAATLSQEMAAVNALIRTRMASEHAPRIPEVTAHLVEAGGKRLRPMLTLAAARLCGYQGEDHVKLAATVEFIHTATLLHDDVVDESGQRRGRPTANLLWDNKSSVLVGDYLFARSFQLMVETGSLRVLDILANAAATIAEGEVLQMTAASDLRTDESVYLQVVRGKTAALFSAATEVGGVIAGVPEAQVRALFEYGDALGIAFQIADDLLDYQGDAKATGKNVGDDFRERKLTLPVIKAVAQATDEERAFWVRTIEKGKQAEGDLEQALALMEKYGTLAATRADAHAWAEKARTALELLPNHEIRTMLSDLADYVVARLS

SEQ ID NO: 25 - DNA, 8228 bp, Artificial Sequence
  Plasmid pDMW359-Ob_ddsA
catggtagcgttgagactggctcgagtcgtgcgaccgacaggagcctcgatccgtcacttgacatggtcccaccctgctcgactctattcgtccgtcgacaaggtgaatctgcccaaggctccctccaaggaggagctcaagactatggacaagcctgttgagaagccccatgaggccatcgctgcactgcttgccgacgatctcggagccgtcaacgctctgatccgagagcgaatggcctctcgacatgctcctcgaatcccagaggtgactgcccatctggttgaggctggaggcaagcgaatccgacccatgctcactcttgctgcagcccgactgtgtggatacgacggtccttaccacatccaccttgcagccacagtggagttcatccacacagccacactcctgcatgacgatgtcgttgacgagtctgctcagcgacgaggcagacccactgccaatctgctctgggacaacaagtcgtccgtcctcgttggagactacctgttcgctcgagccttccagctcatggtcgagcctggcaaccttcgagtcctctccatcctctctgacgctgcagccactatcgctgagggtgaggtcctgcagctgtctgctgcacaggacctcaagactaccgaggagacctaccttcaggtcatccgaggcaagaccgctgccctgttctctgcagctactgaagctggaggtgagatcgcaggagcctctcctgctcaggttcgagccctcttcgactacggagatgcacttggcatcgccttccagatggctgatgacctccttgactggactggcaagactgattccactggcaagaacgtcggtgatgacttccgagagcgaaagctcactctgcctctcatccgagctgttgctgcagccgatgacgaggaacgagctttctggactcgaaccatcgagaagggtcgacagaacgacgaggatctggccacagctcgagagctgcttgaccgacacggtgctctcggatccacccgagagactgctctggactgggcagatcgagccaagtctgctctgactcaccttcctgatcacgacctgacagcccacctctctgatctcgctgactacgttgtcgagcgactccgataggcggccgcaagtgtggatggggaagtgagtgcccggttctgtgtgcacaattggcaatccaagatggatggattcaacacagggatatagcgagctacgtggtggtgcgaggatatagcaacggatatttatgtttgacacttgagaatgtacgatacaagcactgtccaagtacaatactaaacatactgtacatactcatactcgtacccgggcaacggtttcacttgagtgcagtggctagtgctcttactcgtacagtgtgcaatactgcgtatcatagtctttgatgtatatcgtattcattcatgttagttgcgtacgagccggaagcataaagtgtaaagcctggggtgcctaatgagtgagctaactcacattaattgcgttgcgctcactgcccgctttccagtcgggaaacctgtcgtgccagctgcattaatgaatcggccaacgcgcggggagaggcggtttgcgtattgggcgctcttccgcttcctcgctcactgactcgctgcgctcggtcgttcggctgcggcgagcggtatcagctcactcaaaggcggtaatacggttatccacagaatcaggggataacgcaggaaagaacatgtgagcaaaaggccagcaaaaggccaggaaccgtaaaaaggccgcgttgctggcgtttttccataggctccgcccccctgacgagcatcacaaaaatcgacgctcaagtcagaggtggcgaaacccgacaggactataaagataccaggcgtttccccctggaagctccctcgtgcgctctcctgttccgaccctgccgcttaccggatacctgtccgcctttctcccttcgggaagcgtggcgctttctcatagctcacgctgtaggtatctcagttcggtgtaggtcgttcgctccaagctgggctgtgtgcacgaaccccccgttcagcccgaccgctgcgccttatccggtaactatcgtcttgagtccaacccggtaagacacgacttatcgccactggcagcagccactggtaacaggattagcagagcgaggtatgtaggcggtgctacagagttcttgaagtggtggcctaactacggctacactagaaggacagtatttggtatctgcgctctgctgaagccagttaccttcggaaaaagagttggtagctcttgatccggcaaacaaaccaccgctggtagcggtggtttttttgtttgcaagcagcagattacgcgcagaaaaaaaggatctcaagaagatcctttgatcttttctacggggtctgacgctcagtggaacgaaaactcacgttaagggattttggtcatgagattatcaaaaaggatcttcacctagatccttttaaattaaaaatgaagttttaaatcaatctaaagtatatatgagtaaacttggtctgacagttaccaatgcttaatcagtgaggcacctatctcagcgatctgtctatttcgttcatccatagttgcctgactccccgtcgtgtagataactacgatacgggagggcttaccatctggccccagtgctgcaatgataccgcgagacccacgctcaccggctccagatttatcagcaataaaccagccagccggaagggccgagcgcagaagtggtcctgcaactttatccgcctccatccagtctattaattgttgccgggaagctagagtaagtagttcgccagttaatagtttgcgcaacgttgttgccattgctacaggcatcgtggtgtcacgctcgtcgtttggtatggcttcattcagctccggttcccaacgatcaaggcgagttacatgatcccccatgttgtgcaaaaaagcggttagctccttcggtcctccgatcgttgtcagaagtaagttggccgcagtgttatcactcatggttatggcagcactgcataattctcttactgtcatgccatccgtaagatgcttttctgtgactggtgagtactcaaccaagtcattctgagaatagtgtatgcggcgaccgagttgctcttgcccggcgtcaatacgggataataccgcgccacatagcagaactttaaaagtgctcatcattggaaaacgttcttcggggcgaaaactctcaaggatcttaccgctgttgagatccagttcgatgtaacccactcgtgcacccaactgatcttcagcatcttttactttcaccagcgtttctgggtgagcaaaaacaggaaggcaaaatgccgcaaaaaagggaataagggcgacacggaaatgttgaatactcatactcttcctttttcaatattattgaagcatttatcagggttattgtctcatgagcggatacatatttgaatgtatttagaaaaataaacaaataggggttccgcgcacatttccccgaaaagtgccacctgacgcgccctgtagcggcgcattaagcgcggcgggtgtggtggttacgcgcagcgtgaccgctacacttgccagcgccctagcgcccgctcctttcgctttcttcccttcctttctcgccacgttcgccggctttccccgtcaagctctaaatcgggggctccctttagggttccgatttagtgctttacggcacctcgaccccaaaaaacttgattagggtgatggttcacgtagtgggccatcgccctgatagacggtttttcgccctttgacgttggagtccacgttctttaatagtggactcttgttccaaactggaacaacactcaaccctatctcggtctattcttttgatttataagggattttgccgatttcggcctattggttaaaaaatgagctgatttaacaaaaatttaacgcgaattttaacaaaatattaacgcttacaatttccattcgccattcaggctgcgcaactgttgggaagggcgatcggtgcgggcctcttcgctattacgccagctggcgaaagggggatgtgctgcaaggcgattaagttgggtaacgccagggttttcccagtcacgacgttgtaaaacgacggccagtgaattgtaatacgactcactatagggcgaattgggtaccgggccccccctcgaggtcgatggtgtcgataagcttgatatcgaattcatgtcacacaaaccgatcttcgcctcaaggaaacctaattctacatccgagagactgccgagatccagtctacactgattaattttcgggccaataatttaaaaaaatcgtgttatataatattatatgtattatatatatacatcatgatgatactgacagtcatgtcccattgctaaatagacagactccatctgccgcctccaactgatgttctcaatatttaaggggtcatctcgcattgtttaataataaacagactccatctaccgcctccaaatgatgttctcaaaatatattgtatgaacttatttttattacttagtattattagacaacttacttgctttatgaaaaacacttcctatttaggaaacaatttataatggcagttcgttcatttaacaatttatgtagaataaatgttataaatgcgtatgggaaatcttaaatatggatagcataaatgatatctgcattgcctaattcgaaatcaacagcaacgaaaaaaatcccttgtacaacataaatagtcatcgagaaatatcaactatcaaagaacagctattcacacgttactattgagattattattggacgagaatcacacactcaactgtctttctctcttctagaaatacaggtacaagtatgtactattctcattgttcatacttctagtcatttcatcccacatattccttggatttctctccaatgaatgacattctatcttgcaaattcaacaattataataagatataccaaagtagcggtatagtggcaatcaaaaagcttctctggtgtgcttctcgtatttatttttattctaatgatccattaaaggtatatatttatttcttgttatataatccttttgtttattacatgggctggatacataaaggtattttgatttaattttttgcttaaattcaatcccccctcgttcagtgtcaactgtaatggtaggaaattaccatacttttgaagaagcaaaaaaaatgaaagaaaaaaaaaatcgtatttccaggttagacgttccgcagaatctagaatgcggtatgcggtacattgttcttcgaacgtaaaagttgcgctccctgagatattgtacatttttgcttttacaagtacaagtacatcgtacaactatgtactactgttgatgcatccacaacagtttgttttgtttttttttgttttttttttttctaatgattcattaccgctatgtatacctacttgtacttgtagtaagccgggttattggcgttcaattaatcatagacttatgaatctgcacggtgtgcgctgcgagttacttttagcttatgcatgctacttgggtgtaatattgggatctgttcggaaatcaacggatgctcaatcgatttcgacagtaattaattaagtcatacacaagtcagctttcttcgagcctcatataagtataagtagttcaacgtattagcactgtacccagcatctccgtatcgagaaacacaacaacatgccccattggacagatcatgcggatacacaggttgtgcagtatcatacatactcgatcagacaggtcgtctgaccatcatacaagctgaacaagcgctccatacttgcacgctctctatatacacagttaaattacatatccatagtctaacctctaacagttaatcttctggtaagcctcccagccagccttctggtatcgcttggcctcctcaataggatctcggttctggccgtacagacctcggccgacaattatgatatccgttccggtagacatgacatcctcaacagttcggtactgctgtccgagagcgtctcccttgtcgtcaagacccaccccgggggtcagaataagccagtcctcagagtcgcccttaggtcggttctgggcaatgaagccaaccacaaactcggggtcggatcgggcaagctcaatggtctgcttggagtactcgccagtggccagagagcccttgcaagacagctcggccagcatgagcagacctctggccagcttctcgttgggagaggggactaggaactccttgtactgggagttctcgtagtcagagacgtcctccttcttctgttcagagacagtttcctcggcaccagctcgcaggccagcaatgattccggttccgggtacaccgtgggcgttggtgatatcggaccactcggcgattcggtgacaccggtactggtgcttgacagtgttgccaatatctgcgaactttctgtcctcgaacaggaagaaaccgtgcttaagagcaagttccttgagggggagcacagtgccggcgtaggtgaagtcgtcaatgatgtcgatatgggttttgatcatgcacacataaggtccgaccttatcggcaagctcaatgagctccttggtggtggtaacatccagagaagcacacaggttggttttcttggctgccacgagcttgagcactcgagcggcaaaggcggacttgtggacgttagctcgagcttcgtaggagggcattttggtggtgaagaggagactgaaataaatttagtctgcagaactttttatcggaaccttatctggggcagtgaagtatatgttatggtaatagttacgagttagttgaacttatagatagactggactatacggctatcggtccaaattagaaagaacgtcaatggctctctgggcgtcgcctttgccgacaaaaatgtgatcatgatgaaagccagcaatgacgttgcagctgatattgttgtcggccaaccgcgccgaaaacgcagctgtcagacccacagcctccaacgaagaatgtatcgtcaaagtgatccaagcacactcatagttggagtcgtactccaaaggcggcaatgacgagtcagacagatactcgtcgactcaggcgacgacggaattcctgcagcccatctgcagaattcaggagagaccgggttggcggcgtatttgtgtcccaaaaaacagccccaattgccccggagaagacggccaggccgcctagatgacaaattcaacaactcacagctgactttctgccattgccactaggggggggcctttttatatggccaagccaagctctccacgtcggttgggctgcacccaacaataaatgggtagggttgcaccaacaaagggatgggatggggggtagaagatacgaggataacggggctcaatggcacaaataagaacgaatactgccattaagactcgtgatccagcgactgacaccattgcatcatctaagggcctcaaaactacctcggaactgctgcgctgatctggacaccacagaggttccgagcactttaggttgcaccaaatgtcccaccaggtgcaggcagaaaacgctggaacagcgtgtacagtttgtcttaacaaaaagtgagggcgctgaggtcgagcagggtggtgtgacttgttatagcctttagagctgcgaaagcgcgtatggatttggctcatcaggccagattgagggtctgtggacacatgtcatgttagtgtacttcaatcgccccctggatatagccccgacaataggccgtggcctcatttttttgccttccgcacatttccattgctcggtacccacaccttgcttctcctgcacttgccaaccttaatactggtttacattgaccaacatcttacaagcggggggcttgtctagggtatatataaacagtggctctcccaatcggttgccagtctcttttttcctttctttccccacagattcgaaatctaaactacacatcacacaatgcctgttactgacgtccttaagcgaaagtccggtgtcatcgtcggcgacgatgtccgagccgtgagtatccacgacaagatcagtgtcgagacgacgcgttttgtgtaatgacacaatccgaaagtcgctagcaacacacactctctacacaaactaacccagctctc

SEQ ID NO: 26 - DNA, 1150 bp, Artificial Sequence
  Fusion of GenBank Accession No. XP_505040 (N-terminus of Yarrowia lipolytica  ppt1 gene encoding p-hydroxybenzoate:polyprenyl transferase) and GenBank Accession No. EAQ04419 (Oceanicola batsensis HTCC2597 ddsA)
ccatggtagcgttgagactggctcgagtcgtgcgaccgacaggagcctcgatccgtcacttgacatggtcccaccctgctcgactctattcgtccgtcgacaaggtgaatctgcccaaggctccctccaaggaggagctcaagactatggacaagcctgttgagaagccccatgaggccatcgctgcactgcttgccgacgatctcggagccgtcaacgctctgatccgagagcgaatggcctctcgacatgctcctcgaatcccagaggtgactgcccatctggttgaggctggaggcaagcgaatccgacccatgctcactcttgctgcagcccgactgtgtggatacgacggtccttaccacatccaccttgcagccacagtggagttcatccacacagccacactcctgcatgacgatgtcgttgacgagtctgctcagcgacgaggcagacccactgccaatctgctctgggacaacaagtcgtccgtcctcgttggagactacctgttcgctcgagccttccagctcatggtcgagcctggcaaccttcgagtcctctccatcctctctgacgctgcagccactatcgctgagggtgaggtcctgcagctgtctgctgcacaggacctcaagactaccgaggagacctaccttcaggtcatccgaggcaagaccgctgccctgttctctgcagctactgaagctggaggtgagatcgcaggagcctctcctgctcaggttcgagccctcttcgactacggagatgcacttggcatcgccttccagatggctgatgacctccttgactggactggcaagactgattccactggcaagaacgtcggtgatgacttccgagagcgaaagctcactctgcctctcatccgagctgttgctgcagccgatgacgaggaacgagctttctggactcgaaccatcgagaagggtcgacagaacgacgaggatctggccacagctcgagagctgcttgaccgacacggtgctctcggatccacccgagagactgctctggactgggcagatcgagccaagtctgctctgactcaccttcctgatcacgacctgacagcccacctctctgatctcgctgactacgttgtcgagcgactccgataggcggccgc

SEQ ID NO: 27 - protein, 379 aa, Artificial Sequence
  Fusion of GenBank Accession No. XP_505040 (N-terminus of Yarrowia lipolytica  ppt1 gene encoding p-hydroxybenzoate:polyprenyl transferase) and GenBank Accession No. EAQ04419 (Oceanicola batsensis HTCC2597 ddsA)
MVALRLARVVRPTGASIRHLTWSHPARLYSSVDKVNLPKAPSKEELKTMDKPVEKPHEAIAALLADDLGAVNALIRERMASRHAPRIPEVTAHLVEAGGKRIRPMLTLAAARLCGYDGPYHIHLAATVEFIHTATLLHDDVVDESAQRRGRPTANLLWDNKSSVLVGDYLFARAFQLMVEPGNLRVLSILSDAAATIAEGEVLQLSAAQDLKTTEETYLQVIRGKTAALFSAATEAGGEIAGASPAQVRALFDYGDALGIAFQMADDLLDWTGKTDSTGKNVGDDFRERKLTLPLIRAVAAADDEERAFWTRTIEKGRQNDEDLATARELLDRHGALGSTRETALDWADRAKSALTHLPDHDLTAHLSDLADYVVERLR

SEQ ID NO: 28 - DNA, 8249 bp, Artificial Sequence
  Plasmid pDMW359-Rl_ddsA
catggtagcgttgagactggctcgagtcgtgcgaccgacaggagcctcgatccgtcacttgacatggtcccaccctgctcgactctattcgtccgtcgacaaggtgaatctgcccaaggctccctccaaggaggagctcaagactatgggtgtggtcatccctctggaagagtccaagaacaaactggcctcgatcaagcctctggtcgacctcactcgagccgacatggagcgagtcaaccagctcatcctgtccaaggctggctcggacgttcagatgattcccgaggtcgccaaccatctcatctcgtctggaggcaagcgacttcgacccatgctcactcttgcctctgcctcactcttcgactaccgaggtgagaatcatatcaagctcgctacctctgtcgagttcatgcacactgctactctcctgcatgacgatgtggtcgacgagtccgaccttcgacgaggcaagtccaccgctcgaatgatctggggtaaccaggcttctgtgcttgtgggtgacttcctgctcggtcaggccttccgaatgatggtggacgtcggttcgctcgacgctcttgacgttctctcgtccgctgcctgcgtcatagcagagggagaagtcctccagctctccgtcgctaagaacatggagaccactgaggatgactacctctctgtcatccgagccaagactgctgccctgttcgctgcagctgccgaggtcggtcccatcgttgctgaggtcggacgatctggacgaaacgccctgaagtcctacggtatgaacctgggtcttgcattccagctggttgatgacgctctcgactacggtggaaaggctgccgatctcggtaagaacgttggtgatgacttccgagaaggcaagatcaccctgcctgtcatccttgcctaccgacgaggaaccgaggacgagcgagccttctggcgagatgccattgaagctggcaactccactgacgccaacctcgagaaggctctcggactcatcactaagtacggcactctgtctgacacaatcggacgagccatccactacggaaccatcgctcgagatgctctggctcctcttcctgacactgtctggaagtctgctctgatggaagtgatcgacttctgcatcgagcgagtgaactaggcggccgcaagtgtggatggggaagtgagtgcccggttctgtgtgcacaattggcaatccaagatggatggattcaacacagggatatagcgagctacgtggtggtgcgaggatatagcaacggatatttatgtttgacacttgagaatgtacgatacaagcactgtccaagtacaatactaaacatactgtacatactcatactcgtacccgggcaacggtttcacttgagtgcagtggctagtgctcttactcgtacagtgtgcaatactgcgtatcatagtctttgatgtatatcgtattcattcatgttagttgcgtacgagccggaagcataaagtgtaaagcctggggtgcctaatgagtgagctaactcacattaattgcgttgcgctcactgcccgctttccagtcgggaaacctgtcgtgccagctgcattaatgaatcggccaacgcgcggggagaggcggtttgcgtattgggcgctcttccgcttcctcgctcactgactcgctgcgctcggtcgttcggctgcggcgagcggtatcagctcactcaaaggcggtaatacggttatccacagaatcaggggataacgcaggaaagaacatgtgagcaaaaggccagcaaaaggccaggaaccgtaaaaaggccgcgttgctggcgtttttccataggctccgcccccctgacgagcatcacaaaaatcgacgctcaagtcagaggtggcgaaacccgacaggactataaagataccaggcgtttccccctggaagctccctcgtgcgctctcctgttccgaccctgccgcttaccggatacctgtccgcctttctcccttcgggaagcgtggcgctttctcatagctcacgctgtaggtatctcagttcggtgtaggtcgttcgctccaagctgggctgtgtgcacgaaccccccgttcagcccgaccgctgcgccttatccggtaactatcgtcttgagtccaacccggtaagacacgacttatcgccactggcagcagccactggtaacaggattagcagagcgaggtatgtaggcggtgctacagagttcttgaagtggtggcctaactacggctacactagaaggacagtatttggtatctgcgctctgctgaagccagttaccttcggaaaaagagttggtagctcttgatccggcaaacaaaccaccgctggtagcggtggtttttttgtttgcaagcagcagattacgcgcagaaaaaaaggatctcaagaagatcctttgatcttttctacggggtctgacgctcagtggaacgaaaactcacgttaagggattttggtcatgagattatcaaaaaggatcttcacctagatccttttaaattaaaaatgaagttttaaatcaatctaaagtatatatgagtaaacttggtctgacagttaccaatgcttaatcagtgaggcacctatctcagcgatctgtctatttcgttcatccatagttgcctgactccccgtcgtgtagataactacgatacgggagggcttaccatctggccccagtgctgcaatgataccgcgagacccacgctcaccggctccagatttatcagcaataaaccagccagccggaagggccgagcgcagaagtggtcctgcaactttatccgcctccatccagtctattaattgttgccgggaagctagagtaagtagttcgccagttaatagtttgcgcaacgttgttgccattgctacaggcatcgtggtgtcacgctcgtcgtttggtatggcttcattcagctccggttcccaacgatcaaggcgagttacatgatcccccatgttgtgcaaaaaagcggttagctccttcggtcctccgatcgttgtcagaagtaagttggccgcagtgttatcactcatggttatggcagcactgcataattctcttactgtcatgccatccgtaagatgcttttctgtgactggtgagtactcaaccaagtcattctgagaatagtgtatgcggcgaccgagttgctcttgcccggcgtcaatacgggataataccgcgccacatagcagaactttaaaagtgctcatcattggaaaacgttcttcggggcgaaaactctcaaggatcttaccgctgttgagatccagttcgatgtaacccactcgtgcacccaactgatcttcagcatcttttactttcaccagcgtttctgggtgagcaaaaacaggaaggcaaaatgccgcaaaaaagggaataagggcgacacggaaatgttgaatactcatactcttcctttttcaatattattgaagcatttatcagggttattgtctcatgagcggatacatatttgaatgtatttagaaaaataaacaaataggggttccgcgcacatttccccgaaaagtgccacctgacgcgccctgtagcggcgcattaagcgcggcgggtgtggtggttacgcgcagcgtgaccgctacacttgccagcgccctagcgcccgctcctttcgctttcttcccttcctttctcgccacgttcgccggctttccccgtcaagctctaaatcgggggctccctttagggttccgatttagtgctttacggcacctcgaccccaaaaaacttgattagggtgatggttcacgtagtgggccatcgccctgatagacggtttttcgccctttgacgttggagtccacgttctttaatagtggactcttgttccaaactggaacaacactcaaccctatctcggtctattcttttgatttataagggattttgccgatttcggcctattggttaaaaaatgagctgatttaacaaaaatttaacgcgaattttaacaaaatattaacgcttacaatttccattcgccattcaggctgcgcaactgttgggaagggcgatcggtgcgggcctcttcgctattacgccagctggcgaaagggggatgtgctgcaaggcgattaagttgggtaacgccagggttttcccagtcacgacgttgtaaaacgacggccagtgaattgtaatacgactcactatagggcgaattgggtaccgggccccccctcgaggtcgatggtgtcgataagcttgatatcgaattcatgtcacacaaaccgatcttcgcctcaaggaaacctaattctacatccgagagactgccgagatccagtctacactgattaattttcgggccaataatttaaaaaaatcgtgttatataatattatatgtattatatatatacatcatgatgatactgacagtcatgtcccattgctaaatagacagactccatctgccgcctccaactgatgttctcaatatttaaggggtcatctcgcattgtttaataataaacagactccatctaccgcctccaaatgatgttctcaaaatatattgtatgaacttatttttattacttagtattattagacaacttacttgctttatgaaaaacacttcctatttaggaaacaatttataatggcagttcgttcatttaacaatttatgtagaataaatgttataaatgcgtatgggaaatcttaaatatggatagcataaatgatatctgcattgcctaattcgaaatcaacagcaacgaaaaaaatcccttgtacaacataaatagtcatcgagaaatatcaactatcaaagaacagctattcacacgttactattgagattattattggacgagaatcacacactcaactgtctttctctcttctagaaatacaggtacaagtatgtactattctcattgttcatacttctagtcatttcatcccacatattccttggatttctctccaatgaatgacattctatcttgcaaattcaacaattataataagatataccaaagtagcggtatagtggcaatcaaaaagcttctctggtgtgcttctcgtatttatttttattctaatgatccattaaaggtatatatttatttcttgttatataatccttttgtttattacatgggctggatacataaaggtattttgatttaattttttgcttaaattcaatcccccctcgttcagtgtcaactgtaatggtaggaaattaccatacttttgaagaagcaaaaaaaatgaaagaaaaaaaaaatcgtatttccaggttagacgttccgcagaatctagaatgcggtatgcggtacattgttcttcgaacgtaaaagttgcgctccctgagatattgtacatttttgcttttacaagtacaagtacatcgtacaactatgtactactgttgatgcatccacaacagtttgttttgtttttttttgttttttttttttctaatgattcattaccgctatgtatacctacttgtacttgtagtaagccgggttattggcgttcaattaatcatagacttatgaatctgcacggtgtgcgctgcgagttacttttagcttatgcatgctacttgggtgtaatattgggatctgttcggaaatcaacggatgctcaatcgatttcgacagtaattaattaagtcatacacaagtcagctttcttcgagcctcatataagtataagtagttcaacgtattagcactgtacccagcatctccgtatcgagaaacacaacaacatgccccattggacagatcatgcggatacacaggttgtgcagtatcatacatactcgatcagacaggtcgtctgaccatcatacaagctgaacaagcgctccatacttgcacgctctctatatacacagttaaattacatatccatagtctaacctctaacagttaatcttctggtaagcctcccagccagccttctggtatcgcttggcctcctcaataggatctcggttctggccgtacagacctcggccgacaattatgatatccgttccggtagacatgacatcctcaacagttcggtactgctgtccgagagcgtctcccttgtcgtcaagacccaccccgggggtcagaataagccagtcctcagagtcgcccttaggtcggttctgggcaatgaagccaaccacaaactcggggtcggatcgggcaagctcaatggtctgcttggagtactcgccagtggccagagagcccttgcaagacagctcggccagcatgagcagacctctggccagcttctcgttgggagaggggactaggaactccttgtactgggagttctcgtagtcagagacgtcctccttcttctgttcagagacagtttcctcggcaccagctcgcaggccagcaatgattccggttccgggtacaccgtgggcgttggtgatatcggaccactcggcgattcggtgacaccggtactggtgcttgacagtgttgccaatatctgcgaactttctgtcctcgaacaggaagaaaccgtgcttaagagcaagttccttgagggggagcacagtgccggcgtaggtgaagtcgtcaatgatgtcgatatgggttttgatcatgcacacataaggtccgaccttatcggcaagctcaatgagctccttggtggtggtaacatccagagaagcacacaggttggttttcttggctgccacgagcttgagcactcgagcggcaaaggcggacttgtggacgttagctcgagcttcgtaggagggcattttggtggtgaagaggagactgaaataaatttagtctgcagaactttttatcggaaccttatctggggcagtgaagtatatgttatggtaatagttacgagttagttgaacttatagatagactggactatacggctatcggtccaaattagaaagaacgtcaatggctctctgggcgtcgcctttgccgacaaaaatgtgatcatgatgaaagccagcaatgacgttgcagctgatattgttgtcggccaaccgcgccgaaaacgcagctgtcagacccacagcctccaacgaagaatgtatcgtcaaagtgatccaagcacactcatagttggagtcgtactccaaaggcggcaatgacgagtcagacagatactcgtcgactcaggcgacgacggaattcctgcagcccatctgcagaattcaggagagaccgggttggcggcgtatttgtgtcccaaaaaacagccccaattgccccggagaagacggccaggccgcctagatgacaaattcaacaactcacagctgactttctgccattgccactaggggggggcctttttatatggccaagccaagctctccacgtcggttgggctgcacccaacaataaatgggtagggttgcaccaacaaagggatgggatggggggtagaagatacgaggataacggggctcaatggcacaaataagaacgaatactgccattaagactcgtgatccagcgactgacaccattgcatcatctaagggcctcaaaactacctcggaactgctgcgctgatctggacaccacagaggttccgagcactttaggttgcaccaaatgtcccaccaggtgcaggcagaaaacgctggaacagcgtgtacagtttgtcttaacaaaaagtgagggcgctgaggtcgagcagggtggtgtgacttgttatagcctttagagctgcgaaagcgcgtatggatttggctcatcaggccagattgagggtctgtggacacatgtcatgttagtgtacttcaatcgccccctggatatagccccgacaataggccgtggcctcatttttttgccttccgcacatttccattgctcggtacccacaccttgcttctcctgcacttgccaaccttaatactggtttacattgaccaacatcttacaagcggggggcttgtctagggtatatataaacagtggctctcccaatcggttgccagtctcttttttcctttctttccccacagattcgaaatctaaactacacatcacacaatgcctgttactgacgtccttaagcgaaagtccggtgtcatcgtcggcgacgatgtccgagccgtgagtatccacgacaagatcagtgtcgagacgacgcgttttgtgtaatgacacaatccgaaagtcgctagcaacacacactctctacacaaactaacccagctctc

SEQ ID NO: 29 - DNA, 1171 bp, Artificial Sequence
  Fusion of GenBank Accession No. XP_505040 (N-terminus of Yarrowia lipolytica  ppt1 gene encoding p-hydroxybenzoate:polyprenyl transferase) and GenBank Accession No. CAK06434 (Rhizobium leguminosarum bv. viciae 3841 ddsA)
ccatggtagcgttgagactggctcgagtcgtgcgaccgacaggagcctcgatccgtcacttgacatggtcccaccctgctcgactctattcgtccgtcgacaaggtgaatctgcccaaggctccctccaaggaggagctcaagactatgggtgtggtcatccctctggaagagtccaagaacaaactggcctcgatcaagcctctggtcgacctcactcgagccgacatggagcgagtcaaccagctcatcctgtccaaggctggctcggacgttcagatgattcccgaggtcgccaaccatctcatctcgtctggaggcaagcgacttcgacccatgctcactcttgcctctgcctcactcttcgactaccgaggtgagaatcatatcaagctcgctacctctgtcgagttcatgcacactgctactctcctgcatgacgatgtggtcgacgagtccgaccttcgacgaggcaagtccaccgctcgaatgatctggggtaaccaggcttctgtgcttgtgggtgacttcctgctcggtcaggccttccgaatgatggtggacgtcggttcgctcgacgctcttgacgttctctcgtccgctgcctgcgtcatagcagagggagaagtcctccagctctccgtcgctaagaacatggagaccactgaggatgactacctctctgtcatccgagccaagactgctgccctgttcgctgcagctgccgaggtcggtcccatcgttgctgaggtcggacgatctggacgaaacgccctgaagtcctacggtatgaacctgggtcttgcattccagctggttgatgacgctctcgactacggtggaaaggctgccgatctcggtaagaacgttggtgatgacttccgagaaggcaagatcaccctgcctgtcatccttgcctaccgacgaggaaccgaggacgagcgagccttctggcgagatgccattgaagctggcaactccactgacgccaacctcgagaaggctctcggactcatcactaagtacggcactctgtctgacacaatcggacgagccatccactacggaaccatcgctcgagatgctctggctcctcttcctgacactgtctggaagtctgctctgatggaagtgatcgacttctgcatcgagcgagtgaactaggcggccgc

SEQ ID NO: 30 - protein, 386 aa, Artificial Sequence
  Fusion of GenBank Accession No. XP_505040 (N-terminus of Yarrowia lipolytica  ppt1 gene encoding p-hydroxybenzoate:polyprenyl transferase) and GenBank Accession No. CAK06434 (Rhizobium leguminosarum bv. viciae 3841 ddsA)
MVALRLARVVRPTGASIRHLTWSHPARLYSSVDKVNLPKAPSKEELKTMGVVIPLEESKNKLASIKPLVDLTRADMERVNQLILSKAGSDVQMIPEVANHLISSGGKRLRPMLTLASASLFDYRGENHIKLATSVEFMHTATLLHDDVVDESDLRRGKSTARMIWGNQASVLVGDFLLGQAFRMMVDVGSLDALDVLSSAACVIAEGEVLQLSVAKNMETTEDDYLSVIRAKTAALFAAAAEVGPIVAEVGRSGRNALKSYGMNLGLAFQLVDDALDYGGKAADLGKNVGDDFREGKITLPVILAYRRGTEDERAFWRDAIEAGNSTDANLEKALGLITKYGTLSDTIGRAIHYGTIARDALAPLPDTVWKSALMEVIDFCIERVN

SEQ ID NO: 31 - DNA, 8249 bp, Artificial Sequence
  Plasmid pDMW359-Ml_ddsA
catggtagcgttgagactggctcgagtcgtgcgaccgacaggagcctcgatccgtcacttgacatggtcccaccctgctcgactctattcgtccgtcgacaaggtgaatctgcccaaggctccctccaaggaggagctcaagactatgggagtcgtgctcaacatcgagaatggcaagcgagaacctgcctccatcaaggacctgatcgatctcactgctgcagacatgggtcgagtcaacgaactcatcctgtccaaggctggttcggacgtcgagatgattcccgaagttgccaaccatctgatctcctctggaggtaagcgacttcgacccatgctgacactcgctgcagcccagatgttcggatatgctggtgaaggacatgtcaagcttgccacctctgttgagttcatgcacactgccacactcctgcatgatgacgtcgtggatgagtctggcatgagacgaggcaagaagactgctcgaatgatctggggtaaccaggcttctgtcctggttggagacttcctccttggacaagcctttcgaatgatggtcgatgttggatctctggaagctctcgacatcctgtcctctgctgcctctatcattgctgaaggtgaggtcatgcagcttgctgcagccaagaacctcgagaccacagaagatgagcacttcgctgtcatcaaggctaagactgctgcactgttctctgctgcagccgaggttggacccgtcattgctcaggctactcgaaacgatcgagctgcactgcgatcctacggaatgaacctcggacttgccttccagctgatcgacgatgctctggactacggtggcacctccaaggaccttggcaagaacgttggagatgacttccgagaaggtaaggtcactctccctgtcatcctggcttaccgacgaggtactaaggctgaacgaaccttctggaagcgagccatcgaggataacgtggtcgacgatgctggtctggagaaggccatcggtctcatgactcgacatggagccatcgctgacaccatcggacgagctcgacacttcggtgagatcgcacgagacgcccttgctcctctcgaagagacccgacagaagtctgctctgatcgatgtcatcgacttctgcatctctcgagtgaactaggcggccgcaagtgtggatggggaagtgagtgcccggttctgtgtgcacaattggcaatccaagatggatggattcaacacagggatatagcgagctacgtggtggtgcgaggatatagcaacggatatttatgtttgacacttgagaatgtacgatacaagcactgtccaagtacaatactaaacatactgtacatactcatactcgtacccgggcaacggtttcacttgagtgcagtggctagtgctcttactcgtacagtgtgcaatactgcgtatcatagtctttgatgtatatcgtattcattcatgttagttgcgtacgagccggaagcataaagtgtaaagcctggggtgcctaatgagtgagctaactcacattaattgcgttgcgctcactgcccgctttccagtcgggaaacctgtcgtgccagctgcattaatgaatcggccaacgcgcggggagaggcggtttgcgtattgggcgctcttccgcttcctcgctcactgactcgctgcgctcggtcgttcggctgcggcgagcggtatcagctcactcaaaggcggtaatacggttatccacagaatcaggggataacgcaggaaagaacatgtgagcaaaaggccagcaaaaggccaggaaccgtaaaaaggccgcgttgctggcgtttttccataggctccgcccccctgacgagcatcacaaaaatcgacgctcaagtcagaggtggcgaaacccgacaggactataaagataccaggcgtttccccctggaagctccctcgtgcgctctcctgttccgaccctgccgcttaccggatacctgtccgcctttctcccttcgggaagcgtggcgctttctcatagctcacgctgtaggtatctcagttcggtgtaggtcgttcgctccaagctgggctgtgtgcacgaaccccccgttcagcccgaccgctgcgccttatccggtaactatcgtcttgagtccaacccggtaagacacgacttatcgccactggcagcagccactggtaacaggattagcagagcgaggtatgtaggcggtgctacagagttcttgaagtggtggcctaactacggctacactagaaggacagtatttggtatctgcgctctgctgaagccagttaccttcggaaaaagagttggtagctcttgatccggcaaacaaaccaccgctggtagcggtggtttttttgtttgcaagcagcagattacgcgcagaaaaaaaggatctcaagaagatcctttgatcttttctacggggtctgacgctcagtggaacgaaaactcacgttaagggattttggtcatgagattatcaaaaaggatcttcacctagatccttttaaattaaaaatgaagttttaaatcaatctaaagtatatatgagtaaacttggtctgacagttaccaatgcttaatcagtgaggcacctatctcagcgatctgtctatttcgttcatccatagttgcctgactccccgtcgtgtagataactacgatacgggagggcttaccatctggccccagtgctgcaatgataccgcgagacccacgctcaccggctccagatttatcagcaataaaccagccagccggaagggccgagcgcagaagtggtcctgcaactttatccgcctccatccagtctattaattgttgccgggaagctagagtaagtagttcgccagttaatagtttgcgcaacgttgttgccattgctacaggcatcgtggtgtcacgctcgtcgtttggtatggcttcattcagctccggttcccaacgatcaaggcgagttacatgatcccccatgttgtgcaaaaaagcggttagctccttcggtcctccgatcgttgtcagaagtaagttggccgcagtgttatcactcatggttatggcagcactgcataattctcttactgtcatgccatccgtaagatgcttttctgtgactggtgagtactcaaccaagtcattctgagaatagtgtatgcggcgaccgagttgctcttgcccggcgtcaatacgggataataccgcgccacatagcagaactttaaaagtgctcatcattggaaaacgttcttcggggcgaaaactctcaaggatcttaccgctgttgagatccagttcgatgtaacccactcgtgcacccaactgatcttcagcatcttttactttcaccagcgtttctgggtgagcaaaaacaggaaggcaaaatgccgcaaaaaagggaataagggcgacacggaaatgttgaatactcatactcttcctttttcaatattattgaagcatttatcagggttattgtctcatgagcggatacatatttgaatgtatttagaaaaataaacaaataggggttccgcgcacatttccccgaaaagtgccacctgacgcgccctgtagcggcgcattaagcgcggcgggtgtggtggttacgcgcagcgtgaccgctacacttgccagcgccctagcgcccgctcctttcgctttcttcccttcctttctcgccacgttcgccggctttccccgtcaagctctaaatcgggggctccctttagggttccgatttagtgctttacggcacctcgaccccaaaaaacttgattagggtgatggttcacgtagtgggccatcgccctgatagacggtttttcgccctttgacgttggagtccacgttctttaatagtggactcttgttccaaactggaacaacactcaaccctatctcggtctattcttttgatttataagggattttgccgatttcggcctattggttaaaaaatgagctgatttaacaaaaatttaacgcgaattttaacaaaatattaacgcttacaatttccattcgccattcaggctgcgcaactgttgggaagggcgatcggtgcgggcctcttcgctattacgccagctggcgaaagggggatgtgctgcaaggcgattaagttgggtaacgccagggttttcccagtcacgacgttgtaaaacgacggccagtgaattgtaatacgactcactatagggcgaattgggtaccgggccccccctcgaggtcgatggtgtcgataagcttgatatcgaattcatgtcacacaaaccgatcttcgcctcaaggaaacctaattctacatccgagagactgccgagatccagtctacactgattaattttcgggccaataatttaaaaaaatcgtgttatataatattatatgtattatatatatacatcatgatgatactgacagtcatgtcccattgctaaatagacagactccatctgccgcctccaactgatgttctcaatatttaaggggtcatctcgcattgtttaataataaacagactccatctaccgcctccaaatgatgttctcaaaatatattgtatgaacttatttttattacttagtattattagacaacttacttgctttatgaaaaacacttcctatttaggaaacaatttataatggcagttcgttcatttaacaatttatgtagaataaatgttataaatgcgtatgggaaatcttaaatatggatagcataaatgatatctgcattgcctaattcgaaatcaacagcaacgaaaaaaatcccttgtacaacataaatagtcatcgagaaatatcaactatcaaagaacagctattcacacgttactattgagattattattggacgagaatcacacactcaactgtctttctctcttctagaaatacaggtacaagtatgtactattctcattgttcatacttctagtcatttcatcccacatattccttggatttctctccaatgaatgacattctatcttgcaaattcaacaattataataagatataccaaagtagcggtatagtggcaatcaaaaagcttctctggtgtgcttctcgtatttatttttattctaatgatccattaaaggtatatatttatttcttgttatataatccttttgtttattacatgggctggatacataaaggtattttgatttaattttttgcttaaattcaatcccccctcgttcagtgtcaactgtaatggtaggaaattaccatacttttgaagaagcaaaaaaaatgaaagaaaaaaaaaatcgtatttccaggttagacgttccgcagaatctagaatgcggtatgcggtacattgttcttcgaacgtaaaagttgcgctccctgagatattgtacatttttgcttttacaagtacaagtacatcgtacaactatgtactactgttgatgcatccacaacagtttgttttgtttttttttgttttttttttttctaatgattcattaccgctatgtatacctacttgtacttgtagtaagccgggttattggcgttcaattaatcatagacttatgaatctgcacggtgtgcgctgcgagttacttttagcttatgcatgctacttgggtgtaatattgggatctgttcggaaatcaacggatgctcaatcgatttcgacagtaattaattaagtcatacacaagtcagctttcttcgagcctcatataagtataagtagttcaacgtattagcactgtacccagcatctccgtatcgagaaacacaacaacatgccccattggacagatcatgcggatacacaggttgtgcagtatcatacatactcgatcagacaggtcgtctgaccatcatacaagctgaacaagcgctccatacttgcacgctctctatatacacagttaaattacatatccatagtctaacctctaacagttaatcttctggtaagcctcccagccagccttctggtatcgcttggcctcctcaataggatctcggttctggccgtacagacctcggccgacaattatgatatccgttccggtagacatgacatcctcaacagttcggtactgctgtccgagagcgtctcccttgtcgtcaagacccaccccgggggtcagaataagccagtcctcagagtcgcccttaggtcggttctgggcaatgaagccaaccacaaactcggggtcggatcgggcaagctcaatggtctgcttggagtactcgccagtggccagagagcccttgcaagacagctcggccagcatgagcagacctctggccagcttctcgttgggagaggggactaggaactccttgtactgggagttctcgtagtcagagacgtcctccttcttctgttcagagacagtttcctcggcaccagctcgcaggccagcaatgattccggttccgggtacaccgtgggcgttggtgatatcggaccactcggcgattcggtgacaccggtactggtgcttgacagtgttgccaatatctgcgaactttctgtcctcgaacaggaagaaaccgtgcttaagagcaagttccttgagggggagcacagtgccggcgtaggtgaagtcgtcaatgatgtcgatatgggttttgatcatgcacacataaggtccgaccttatcggcaagctcaatgagctccttggtggtggtaacatccagagaagcacacaggttggttttcttggctgccacgagcttgagcactcgagcggcaaaggcggacttgtggacgttagctcgagcttcgtaggagggcattttggtggtgaagaggagactgaaataaatttagtctgcagaactttttatcggaaccttatctggggcagtgaagtatatgttatggtaatagttacgagttagttgaacttatagatagactggactatacggctatcggtccaaattagaaagaacgtcaatggctctctgggcgtcgcctttgccgacaaaaatgtgatcatgatgaaagccagcaatgacgttgcagctgatattgttgtcggccaaccgcgccgaaaacgcagctgtcagacccacagcctccaacgaagaatgtatcgtcaaagtgatccaagcacactcatagttggagtcgtactccaaaggcggcaatgacgagtcagacagatactcgtcgactcaggcgacgacggaattcctgcagcccatctgcagaattcaggagagaccgggttggcggcgtatttgtgtcccaaaaaacagccccaattgccccggagaagacggccaggccgcctagatgacaaattcaacaactcacagctgactttctgccattgccactaggggggggcctttttatatggccaagccaagctctccacgtcggttgggctgcacccaacaataaatgggtagggttgcaccaacaaagggatgggatggggggtagaagatacgaggataacggggctcaatggcacaaataagaacgaatactgccattaagactcgtgatccagcgactgacaccattgcatcatctaagggcctcaaaactacctcggaactgctgcgctgatctggacaccacagaggttccgagcactttaggttgcaccaaatgtcccaccaggtgcaggcagaaaacgctggaacagcgtgtacagtttgtcttaacaaaaagtgagggcgctgaggtcgagcagggtggtgtgacttgttatagcctttagagctgcgaaagcgcgtatggatttggctcatcaggccagattgagggtctgtggacacatgtcatgttagtgtacttcaatcgccccctggatatagccccgacaataggccgtggcctcatttttttgccttccgcacatttccattgctcggtacccacaccttgcttctcctgcacttgccaaccttaatactggtttacattgaccaacatcttacaagcggggggcttgtctagggtatatataaacagtggctctcccaatcggttgccagtctcttttttcctttctttccccacagattcgaaatctaaactacacatcacacaatgcctgttactgacgtccttaagcgaaagtccggtgtcatcgtcggcgacgatgtccgagccgtgagtatccacgacaagatcagtgtcgagacgacgcgttttgtgtaatgacacaatccgaaagtcgctagcaacacacactctctacacaaactaacccagctctc

SEQ ID NO: 32 - DNA, 1171 bp, Artificial Sequence
  Fusion of GenBank Accession No. XP_505040 (N-terminus of Yarrowia lipolytica  ppt1 gene encoding p-hydroxybenzoate:polyprenyl transferase) and GenBank Accession No. BAB53531 (Mesorhizobium loti MAFF303099 ddsA)
ccatggtagcgttgagactggctcgagtcgtgcgaccgacaggagcctcgatccgtcacttgacatggtcccaccctgctcgactctattcgtccgtcgacaaggtgaatctgcccaaggctccctccaaggaggagctcaagactatgggagtcgtgctcaacatcgagaatggcaagcgagaacctgcctccatcaaggacctgatcgatctcactgctgcagacatgggtcgagtcaacgaactcatcctgtccaaggctggttcggacgtcgagatgattcccgaagttgccaaccatctgatctcctctggaggtaagcgacttcgacccatgctgacactcgctgcagcccagatgttcggatatgctggtgaaggacatgtcaagcttgccacctctgttgagttcatgcacactgccacactcctgcatgatgacgtcgtggatgagtctggcatgagacgaggcaagaagactgctcgaatgatctggggtaaccaggcttctgtcctggttggagacttcctccttggacaagcctttcgaatgatggtcgatgttggatctctggaagctctcgacatcctgtcctctgctgcctctatcattgctgaaggtgaggtcatgcagcttgctgcagccaagaacctcgagaccacagaagatgagcacttcgctgtcatcaaggctaagactgctgcactgttctctgctgcagccgaggttggacccgtcattgctcaggctactcgaaacgatcgagctgcactgcgatcctacggaatgaacctcggacttgccttccagctgatcgacgatgctctggactacggtggcacctccaaggaccttggcaagaacgttggagatgacttccgagaaggtaaggtcactctccctgtcatcctggcttaccgacgaggtactaaggctgaacgaaccttctggaagcgagccatcgaggataacgtggtcgacgatgctggtctggagaaggccatcggtctcatgactcgacatggagccatcgctgacaccatcggacgagctcgacacttcggtgagatcgcacgagacgcccttgctcctctcgaagagacccgacagaagtctgctctgatcgatgtcatcgacttctgcatctctcgagtgaactaggcggccgc

SEQ ID NO: 33 - protein, 386 aa, Artificial Sequence
  Fusion of GenBank Accession No. XP_505040 (N-terminus of Yarrowia lipolytica  ppt1 gene encoding p-hydroxybenzoate:polyprenyl transferase) and GenBank Accession No. BAB53531 (Mesorhizobium loti MAFF303099 ddsA)
MVALRLARVVRPTGASIRHLTWSHPARLYSSVDKVNLPKAPSKEELKTMGVVLNIENGKREPASIKDLIDLTAADMGRVNELILSKAGSDVEMIPEVANHLISSGGKRLRPMLTLAAAQMFGYAGEGHVKLATSVEFMHTATLLHDDVVDESGMRRGKKTARMIWGNQASVLVGDFLLGQAFRMMVDVGSLEALDILSSAASIIAEGEVMQLAAAKNLETTEDEHFAVIKAKTAALFSAAAEVGPVIAQATRNDRAALRSYGMNLGLAFQLIDDALDYGGTSKDLGKNVGDDFREGKVTLPVILAYRRGTKAERTFWKRAIEDNVVDDAGLEKAIGLMTRHGAIADTIGRARHFGEIARDALAPLEETRQKSALIDVIDFCISRVN

SEQ ID NO: 34 - DNA, 8248 bp, Artificial Sequence
  Plasmid pDMW359-At_ddsA
catggtagcgttgagactggctcgagtcgtgcgaccgacaggagcctcgatccgtcacttgacatggtcccaccctgctcgactctattcgtccgtcgacaaggtgaatctgcccaaggctccctccaaggaggagctcaagactatgggagttgtcattcctcttgaagagtccaagaacaagctggcttcggtcaagcctctcgtcgacctgacacgacccgacatggagcgagtcaatcaactcatcctgtctcgagctggttccgacgttcagatgatcccagaggttgccaaccatctgatctcctctggaggcaagcgacttcgacccatgctgaccctggcttctgcttctatgtttggttacgagggtgacaaccacatcaagctggctacctccgtcgagttcatgcacactgccactctgctccatgacgatgtggtggacgagtctgacctccgacgaggtaagtctacggctcgaactatctggggaaaccaggcttctgtcctcgttggtgacttcctgctcggtcaggccttccgaatgatggtcgatgttggttcgcttgatgctctcgacgtcctgtccactgctgcctctgtcatcgctgaaggtgaggttctccagctctctgttgccaagaacatggagaccacggaggatgactacctccaggtcattcgagccaagactgctgcactcttcgctgcagctgccgaggtcggaccgatcgttgccaagactgacaaggccagccgatctgccctgaagtcttatggcatgaacctcggtctcgctttccagcttgtggacgatgttcttgactacggcggaaagtctgccgacctcggtaagaacactggtgacgacttccgagagggaaagatcactcttccagtcatcctcagctaccgacgaggcactcaggatgagcgagccttctggcgaaacgccatcgagaagggagagtcttccgatgagaacctcgagaaggctctcggactgatcaccaagtacaacggtcttggtgacaccatcggtcgagccactcactacggtaccatcgctcgagacgctcttgctcctcttccgcagtcgccctggaagaacgctctcctggaagtcatcgacttctgtatcgagcgactcaactagcggccgcaagtgtggatggggaagtgagtgcccggttctgtgtgcacaattggcaatccaagatggatggattcaacacagggatatagcgagctacgtggtggtgcgaggatatagcaacggatatttatgtttgacacttgagaatgtacgatacaagcactgtccaagtacaatactaaacatactgtacatactcatactcgtacccgggcaacggtttcacttgagtgcagtggctagtgctcttactcgtacagtgtgcaatactgcgtatcatagtctttgatgtatatcgtattcattcatgttagttgcgtacgagccggaagcataaagtgtaaagcctggggtgcctaatgagtgagctaactcacattaattgcgttgcgctcactgcccgctttccagtcgggaaacctgtcgtgccagctgcattaatgaatcggccaacgcgcggggagaggcggtttgcgtattgggcgctcttccgcttcctcgctcactgactcgctgcgctcggtcgttcggctgcggcgagcggtatcagctcactcaaaggcggtaatacggttatccacagaatcaggggataacgcaggaaagaacatgtgagcaaaaggccagcaaaaggccaggaaccgtaaaaaggccgcgttgctggcgtttttccataggctccgcccccctgacgagcatcacaaaaatcgacgctcaagtcagaggtggcgaaacccgacaggactataaagataccaggcgtttccccctggaagctccctcgtgcgctctcctgttccgaccctgccgcttaccggatacctgtccgcctttctcccttcgggaagcgtggcgctttctcatagctcacgctgtaggtatctcagttcggtgtaggtcgttcgctccaagctgggctgtgtgcacgaaccccccgttcagcccgaccgctgcgccttatccggtaactatcgtcttgagtccaacccggtaagacacgacttatcgccactggcagcagccactggtaacaggattagcagagcgaggtatgtaggcggtgctacagagttcttgaagtggtggcctaactacggctacactagaaggacagtatttggtatctgcgctctgctgaagccagttaccttcggaaaaagagttggtagctcttgatccggcaaacaaaccaccgctggtagcggtggtttttttgtttgcaagcagcagattacgcgcagaaaaaaaggatctcaagaagatcctttgatcttttctacggggtctgacgctcagtggaacgaaaactcacgttaagggattttggtcatgagattatcaaaaaggatcttcacctagatccttttaaattaaaaatgaagttttaaatcaatctaaagtatatatgagtaaacttggtctgacagttaccaatgcttaatcagtgaggcacctatctcagcgatctgtctatttcgttcatccatagttgcctgactccccgtcgtgtagataactacgatacgggagggcttaccatctggccccagtgctgcaatgataccgcgagacccacgctcaccggctccagatttatcagcaataaaccagccagccggaagggccgagcgcagaagtggtcctgcaactttatccgcctccatccagtctattaattgttgccgggaagctagagtaagtagttcgccagttaatagtttgcgcaacgttgttgccattgctacaggcatcgtggtgtcacgctcgtcgtttggtatggcttcattcagctccggttcccaacgatcaaggcgagttacatgatcccccatgttgtgcaaaaaagcggttagctccttcggtcctccgatcgttgtcagaagtaagttggccgcagtgttatcactcatggttatggcagcactgcataattctcttactgtcatgccatccgtaagatgcttttctgtgactggtgagtactcaaccaagtcattctgagaatagtgtatgcggcgaccgagttgctcttgcccggcgtcaatacgggataataccgcgccacatagcagaactttaaaagtgctcatcattggaaaacgttcttcggggcgaaaactctcaaggatcttaccgctgttgagatccagttcgatgtaacccactcgtgcacccaactgatcttcagcatcttttactttcaccagcgtttctgggtgagcaaaaacaggaaggcaaaatgccgcaaaaaagggaataagggcgacacggaaatgttgaatactcatactcttcctttttcaatattattgaagcatttatcagggttattgtctcatgagcggatacatatttgaatgtatttagaaaaataaacaaataggggttccgcgcacatttccccgaaaagtgccacctgacgcgccctgtagcggcgcattaagcgcggcgggtgtggtggttacgcgcagcgtgaccgctacacttgccagcgccctagcgcccgctcctttcgctttcttcccttcctttctcgccacgttcgccggctttccccgtcaagctctaaatcgggggctccctttagggttccgatttagtgctttacggcacctcgaccccaaaaaacttgattagggtgatggttcacgtagtgggccatcgccctgatagacggtttttcgccctttgacgttggagtccacgttctttaatagtggactcttgttccaaactggaacaacactcaaccctatctcggtctattcttttgatttataagggattttgccgatttcggcctattggttaaaaaatgagctgatttaacaaaaatttaacgcgaattttaacaaaatattaacgcttacaatttccattcgccattcaggctgcgcaactgttgggaagggcgatcggtgcgggcctcttcgctattacgccagctggcgaaagggggatgtgctgcaaggcgattaagttgggtaacgccagggttttcccagtcacgacgttgtaaaacgacggccagtgaattgtaatacgactcactatagggcgaattgggtaccgggccccccctcgaggtcgatggtgtcgataagcttgatatcgaattcatgtcacacaaaccgatcttcgcctcaaggaaacctaattctacatccgagagactgccgagatccagtctacactgattaattttcgggccaataatttaaaaaaatcgtgttatataatattatatgtattatatatatacatcatgatgatactgacagtcatgtcccattgctaaatagacagactccatctgccgcctccaactgatgttctcaatatttaaggggtcatctcgcattgtttaataataaacagactccatctaccgcctccaaatgatgttctcaaaatatattgtatgaacttatttttattacttagtattattagacaacttacttgctttatgaaaaacacttcctatttaggaaacaatttataatggcagttcgttcatttaacaatttatgtagaataaatgttataaatgcgtatgggaaatcttaaatatggatagcataaatgatatctgcattgcctaattcgaaatcaacagcaacgaaaaaaatcccttgtacaacataaatagtcatcgagaaatatcaactatcaaagaacagctattcacacgttactattgagattattattggacgagaatcacacactcaactgtctttctctcttctagaaatacaggtacaagtatgtactattctcattgttcatacttctagtcatttcatcccacatattccttggatttctctccaatgaatgacattctatcttgcaaattcaacaattataataagatataccaaagtagcggtatagtggcaatcaaaaagcttctctggtgtgcttctcgtatttatttttattctaatgatccattaaaggtatatatttatttcttgttatataatccttttgtttattacatgggctggatacataaaggtattttgatttaattttttgcttaaattcaatcccccctcgttcagtgtcaactgtaatggtaggaaattaccatacttttgaagaagcaaaaaaaatgaaagaaaaaaaaaatcgtatttccaggttagacgttccgcagaatctagaatgcggtatgcggtacattgttcttcgaacgtaaaagttgcgctccctgagatattgtacatttttgcttttacaagtacaagtacatcgtacaactatgtactactgttgatgcatccacaacagtttgttttgtttttttttgttttttttttttctaatgattcattaccgctatgtatacctacttgtacttgtagtaagccgggttattggcgttcaattaatcatagacttatgaatctgcacggtgtgcgctgcgagttacttttagcttatgcatgctacttgggtgtaatattgggatctgttcggaaatcaacggatgctcaatcgatttcgacagtaattaattaagtcatacacaagtcagctttcttcgagcctcatataagtataagtagttcaacgtattagcactgtacccagcatctccgtatcgagaaacacaacaacatgccccattggacagatcatgcggatacacaggttgtgcagtatcatacatactcgatcagacaggtcgtctgaccatcatacaagctgaacaagcgctccatacttgcacgctctctatatacacagttaaattacatatccatagtctaacctctaacagttaatcttctggtaagcctcccagccagccttctggtatcgcttggcctcctcaataggatctcggttctggccgtacagacctcggccgacaattatgatatccgttccggtagacatgacatcctcaacagttcggtactgctgtccgagagcgtctcccttgtcgtcaagacccaccccgggggtcagaataagccagtcctcagagtcgcccttaggtcggttctgggcaatgaagccaaccacaaactcggggtcggatcgggcaagctcaatggtctgcttggagtactcgccagtggccagagagcccttgcaagacagctcggccagcatgagcagacctctggccagcttctcgttgggagaggggactaggaactccttgtactgggagttctcgtagtcagagacgtcctccttcttctgttcagagacagtttcctcggcaccagctcgcaggccagcaatgattccggttccgggtacaccgtgggcgttggtgatatcggaccactcggcgattcggtgacaccggtactggtgcttgacagtgttgccaatatctgcgaactttctgtcctcgaacaggaagaaaccgtgcttaagagcaagttccttgagggggagcacagtgccggcgtaggtgaagtcgtcaatgatgtcgatatgggttttgatcatgcacacataaggtccgaccttatcggcaagctcaatgagctccttggtggtggtaacatccagagaagcacacaggttggttttcttggctgccacgagcttgagcactcgagcggcaaaggcggacttgtggacgttagctcgagcttcgtaggagggcattttggtggtgaagaggagactgaaataaatttagtctgcagaactttttatcggaaccttatctggggcagtgaagtatatgttatggtaatagttacgagttagttgaacttatagatagactggactatacggctatcggtccaaattagaaagaacgtcaatggctctctgggcgtcgcctttgccgacaaaaatgtgatcatgatgaaagccagcaatgacgttgcagctgatattgttgtcggccaaccgcgccgaaaacgcagctgtcagacccacagcctccaacgaagaatgtatcgtcaaagtgatccaagcacactcatagttggagtcgtactccaaaggcggcaatgacgagtcagacagatactcgtcgactcaggcgacgacggaattcctgcagcccatctgcagaattcaggagagaccgggttggcggcgtatttgtgtcccaaaaaacagccccaattgccccggagaagacggccaggccgcctagatgacaaattcaacaactcacagctgactttctgccattgccactaggggggggcctttttatatggccaagccaagctctccacgtcggttgggctgcacccaacaataaatgggtagggttgcaccaacaaagggatgggatggggggtagaagatacgaggataacggggctcaatggcacaaataagaacgaatactgccattaagactcgtgatccagcgactgacaccattgcatcatctaagggcctcaaaactacctcggaactgctgcgctgatctggacaccacagaggttccgagcactttaggttgcaccaaatgtcccaccaggtgcaggcagaaaacgctggaacagcgtgtacagtttgtcttaacaaaaagtgagggcgctgaggtcgagcagggtggtgtgacttgttatagcctttagagctgcgaaagcgcgtatggatttggctcatcaggccagattgagggtctgtggacacatgtcatgttagtgtacttcaatcgccccctggatatagccccgacaataggccgtggcctcatttttttgccttccgcacatttccattgctcggtacccacaccttgcttctcctgcacttgccaaccttaatactggtttacattgaccaacatcttacaagcggggggcttgtctagggtatatataaacagtggctctcccaatcggttgccagtctcttttttcctttctttccccacagattcgaaatctaaactacacatcacacaatgcctgttactgacgtccttaagcgaaagtccggtgtcatcgtcggcgacgatgtccgagccgtgagtatccacgacaagatcagtgtcgagacgacgcgttttgtgtaatgacacaatccgaaagtcgctagcaacacacactctctacacaaactaacccagctctc

SEQ ID NO: 35 - DNA, 1170 bp, Artificial Sequence
  Fusion of GenBank Accession No. XP_505040 (N-terminus of Yarrowia lipolytica  ppt1 gene encoding p-hydroxybenzoate:polyprenyl transferase) and GenBank Accession No. AAL41650 (Agrobacterium tumefaciens str. C58 ddsA)
ccatggtagcgttgagactggctcgagtcgtgcgaccgacaggagcctcgatccgtcacttgacatggtcccaccctgctcgactctattcgtccgtcgacaaggtgaatctgcccaaggctccctccaaggaggagctcaagactatgggagttgtcattcctcttgaagagtccaagaacaagctggcttcggtcaagcctctcgtcgacctgacacgacccgacatggagcgagtcaatcaactcatcctgtctcgagctggttccgacgttcagatgatcccagaggttgccaaccatctgatctcctctggaggcaagcgacttcgacccatgctgaccctggcttctgcttctatgtttggttacgagggtgacaaccacatcaagctggctacctccgtcgagttcatgcacactgccactctgctccatgacgatgtggtggacgagtctgacctccgacgaggtaagtctacggctcgaactatctggggaaaccaggcttctgtcctcgttggtgacttcctgctcggtcaggccttccgaatgatggtcgatgttggttcgcttgatgctctcgacgtcctgtccactgctgcctctgtcatcgctgaaggtgaggttctccagctctctgttgccaagaacatggagaccacggaggatgactacctccaggtcattcgagccaagactgctgcactcttcgctgcagctgccgaggtcggaccgatcgttgccaagactgacaaggccagccgatctgccctgaagtcttatggcatgaacctcggtctcgctttccagcttgtggacgatgttcttgactacggcggaaagtctgccgacctcggtaagaacactggtgacgacttccgagagggaaagatcactcttccagtcatcctcagctaccgacgaggcactcaggatgagcgagccttctggcgaaacgccatcgagaagggagagtcttccgatgagaacctcgagaaggctctcggactgatcaccaagtacaacggtcttggtgacaccatcggtcgagccactcactacggtaccatcgctcgagacgctcttgctcctcttccgcagtcgccctggaagaacgctctcctggaagtcatcgacttctgtatcgagcgactcaactagcggccgc

SEQ ID NO: 36 - protein, 386 aa, Artificial Sequence
  Fusion of GenBank Accession No. XP_505040 (N-terminus of Yarrowia lipolytica  ppt1 gene encoding p-hydroxybenzoate:polyprenyl transferase) and GenBank Accession No. AAL41650 (Agrobacterium tumefaciens str. C58 ddsA)
MVALRLARVVRPTGASIRHLTWSHPARLYSSVDKVNLPKAPSKEELKTMGVVIPLEESKNKLASVKPLVDLTRPDMERVNQLILSRAGSDVQMIPEVANHLISSGGKRLRPMLTLASASMFGYEGDNHIKLATSVEFMHTATLLHDDVVDESDLRRGKSTARTIWGNQASVLVGDFLLGQAFRMMVDVGSLDALDVLSTAASVIAEGEVLQLSVAKNMETTEDDYLQVIRAKTAALFAAAAEVGPIVAKTDKASRSALKSYGMNLGLAFQLVDDVLDYGGKSADLGKNTGDDFREGKITLPVILSYRRGTQDERAFWRNAIEKGESSDENLEKALGLITKYNGLGDTIGRATHYGTIARDALAPLPQSPWKNALLEVIDFCIERLN

SEQ ID NO: 37 - DNA, 8234 bp, Artificial Sequence
  Plasmid pDMW359-Rs_ddsA
catggtagcgttgagactggctcgagtcgtgcgaccgacaggagcctcgatccgtcacttgacatggtcccaccctgctcgactctattcgtccgtcgacaaggtgaatctgcccaaggctccctccaaggaggagctcaagactatgggtctcgacgagattgccaccaagcctcacgagcagctcgctgcccatcttgccaccaagatggaggccgtgaacgttctcatccgagaacgaatggcctcccgacacgcacctcgaatccctcaggtgactgctcaccttgttgaagctggtggaaagcgacttcgacccatgctcgttctcgccaccgctgacctctgcggatacgatggtcccttcgacgtgcatcttgctgccaccgtggagttcatccacactgccaccctcctgcatgacgatgtcgttgacgagtctgctcagagacgaggacgacccactgctaatctgctttgggacaacaagtcgtctgtccttgtcggtgactacctgtttgcacgagccttccagctcatggtggaacctggctctcttcgagtcctcgacatcctgtcgaacgcatctgctaccatcgctgaaggagaggttctgcagctctctgctgcacaggacctggctaccacagaggacatctacctccaggtcgtgcgaggtaagacagcagctctcttctctgctgccaccgaagtcggtggagtcatcgcaggagctcctgaggaccacgtcaaggctctcttcgagtacggtgacgctctcggtatagccttccagatcgtcgatgacctgcttgactaccagggtgacgtgaagtctactggcaagaacgtcggagacgacttccgagaacgaaagctcactcttcctgtcatcaaggcagtcgcagctgcctctgctgaggaacgagccttctggaagcgaaccatcgagaagggtgaccagcgagatggtgatctcgagcacgcactgaccctcatgcaggctcacggtgcacttgagcagacccgagctgaggcacttgattgggctgcacgagctcgagctgccattgccgtccttcccgaccaccctgtccagcgaatgcttgacaacctggctggatacgtcgttgctcgaatctcttaggcggccgcaagtgtggatggggaagtgagtgcccggttctgtgtgcacaattggcaatccaagatggatggattcaacacagggatatagcgagctacgtggtggtgcgaggatatagcaacggatatttatgtttgacacttgagaatgtacgatacaagcactgtccaagtacaatactaaacatactgtacatactcatactcgtacccgggcaacggtttcacttgagtgcagtggctagtgctcttactcgtacagtgtgcaatactgcgtatcatagtctttgatgtatatcgtattcattcatgttagttgcgtacgagccggaagcataaagtgtaaagcctggggtgcctaatgagtgagctaactcacattaattgcgttgcgctcactgcccgctttccagtcgggaaacctgtcgtgccagctgcattaatgaatcggccaacgcgcggggagaggcggtttgcgtattgggcgctcttccgcttcctcgctcactgactcgctgcgctcggtcgttcggctgcggcgagcggtatcagctcactcaaaggcggtaatacggttatccacagaatcaggggataacgcaggaaagaacatgtgagcaaaaggccagcaaaaggccaggaaccgtaaaaaggccgcgttgctggcgtttttccataggctccgcccccctgacgagcatcacaaaaatcgacgctcaagtcagaggtggcgaaacccgacaggactataaagataccaggcgtttccccctggaagctccctcgtgcgctctcctgttccgaccctgccgcttaccggatacctgtccgcctttctcccttcgggaagcgtggcgctttctcatagctcacgctgtaggtatctcagttcggtgtaggtcgttcgctccaagctgggctgtgtgcacgaaccccccgttcagcccgaccgctgcgccttatccggtaactatcgtcttgagtccaacccggtaagacacgacttatcgccactggcagcagccactggtaacaggattagcagagcgaggtatgtaggcggtgctacagagttcttgaagtggtggcctaactacggctacactagaaggacagtatttggtatctgcgctctgctgaagccagttaccttcggaaaaagagttggtagctcttgatccggcaaacaaaccaccgctggtagcggtggtttttttgtttgcaagcagcagattacgcgcagaaaaaaaggatctcaagaagatcctttgatcttttctacggggtctgacgctcagtggaacgaaaactcacgttaagggattttggtcatgagattatcaaaaaggatcttcacctagatccttttaaattaaaaatgaagttttaaatcaatctaaagtatatatgagtaaacttggtctgacagttaccaatgcttaatcagtgaggcacctatctcagcgatctgtctatttcgttcatccatagttgcctgactccccgtcgtgtagataactacgatacgggagggcttaccatctggccccagtgctgcaatgataccgcgagacccacgctcaccggctccagatttatcagcaataaaccagccagccggaagggccgagcgcagaagtggtcctgcaactttatccgcctccatccagtctattaattgttgccgggaagctagagtaagtagttcgccagttaatagtttgcgcaacgttgttgccattgctacaggcatcgtggtgtcacgctcgtcgtttggtatggcttcattcagctccggttcccaacgatcaaggcgagttacatgatcccccatgttgtgcaaaaaagcggttagctccttcggtcctccgatcgttgtcagaagtaagttggccgcagtgttatcactcatggttatggcagcactgcataattctcttactgtcatgccatccgtaagatgcttttctgtgactggtgagtactcaaccaagtcattctgagaatagtgtatgcggcgaccgagttgctcttgcccggcgtcaatacgggataataccgcgccacatagcagaactttaaaagtgctcatcattggaaaacgttcttcggggcgaaaactctcaaggatcttaccgctgttgagatccagttcgatgtaacccactcgtgcacccaactgatcttcagcatcttttactttcaccagcgtttctgggtgagcaaaaacaggaaggcaaaatgccgcaaaaaagggaataagggcgacacggaaatgttgaatactcatactcttcctttttcaatattattgaagcatttatcagggttattgtctcatgagcggatacatatttgaatgtatttagaaaaataaacaaataggggttccgcgcacatttccccgaaaagtgccacctgacgcgccctgtagcggcgcattaagcgcggcgggtgtggtggttacgcgcagcgtgaccgctacacttgccagcgccctagcgcccgctcctttcgctttcttcccttcctttctcgccacgttcgccggctttccccgtcaagctctaaatcgggggctccctttagggttccgatttagtgctttacggcacctcgaccccaaaaaacttgattagggtgatggttcacgtagtgggccatcgccctgatagacggtttttcgccctttgacgttggagtccacgttctttaatagtggactcttgttccaaactggaacaacactcaaccctatctcggtctattcttttgatttataagggattttgccgatttcggcctattggttaaaaaatgagctgatttaacaaaaatttaacgcgaattttaacaaaatattaacgcttacaatttccattcgccattcaggctgcgcaactgttgggaagggcgatcggtgcgggcctcttcgctattacgccagctggcgaaagggggatgtgctgcaaggcgattaagttgggtaacgccagggttttcccagtcacgacgttgtaaaacgacggccagtgaattgtaatacgactcactatagggcgaattgggtaccgggccccccctcgaggtcgatggtgtcgataagcttgatatcgaattcatgtcacacaaaccgatcttcgcctcaaggaaacctaattctacatccgagagactgccgagatccagtctacactgattaattttcgggccaataatttaaaaaaatcgtgttatataatattatatgtattatatatatacatcatgatgatactgacagtcatgtcccattgctaaatagacagactccatctgccgcctccaactgatgttctcaatatttaaggggtcatctcgcattgtttaataataaacagactccatctaccgcctccaaatgatgttctcaaaatatattgtatgaacttatttttattacttagtattattagacaacttacttgctttatgaaaaacacttcctatttaggaaacaatttataatggcagttcgttcatttaacaatttatgtagaataaatgttataaatgcgtatgggaaatcttaaatatggatagcataaatgatatctgcattgcctaattcgaaatcaacagcaacgaaaaaaatcccttgtacaacataaatagtcatcgagaaatatcaactatcaaagaacagctattcacacgttactattgagattattattggacgagaatcacacactcaactgtctttctctcttctagaaatacaggtacaagtatgtactattctcattgttcatacttctagtcatttcatcccacatattccttggatttctctccaatgaatgacattctatcttgcaaattcaacaattataataagatataccaaagtagcggtatagtggcaatcaaaaagcttctctggtgtgcttctcgtatttatttttattctaatgatccattaaaggtatatatttatttcttgttatataatccttttgtttattacatgggctggatacataaaggtattttgatttaattttttgcttaaattcaatcccccctcgttcagtgtcaactgtaatggtaggaaattaccatacttttgaagaagcaaaaaaaatgaaagaaaaaaaaaatcgtatttccaggttagacgttccgcagaatctagaatgcggtatgcggtacattgttcttcgaacgtaaaagttgcgctccctgagatattgtacatttttgcttttacaagtacaagtacatcgtacaactatgtactactgttgatgcatccacaacagtttgttttgtttttttttgttttttttttttctaatgattcattaccgctatgtatacctacttgtacttgtagtaagccgggttattggcgttcaattaatcatagacttatgaatctgcacggtgtgcgctgcgagttacttttagcttatgcatgctacttgggtgtaatattgggatctgttcggaaatcaacggatgctcaatcgatttcgacagtaattaattaagtcatacacaagtcagctttcttcgagcctcatataagtataagtagttcaacgtattagcactgtacccagcatctccgtatcgagaaacacaacaacatgccccattggacagatcatgcggatacacaggttgtgcagtatcatacatactcgatcagacaggtcgtctgaccatcatacaagctgaacaagcgctccatacttgcacgctctctatatacacagttaaattacatatccatagtctaacctctaacagttaatcttctggtaagcctcccagccagccttctggtatcgcttggcctcctcaataggatctcggttctggccgtacagacctcggccgacaattatgatatccgttccggtagacatgacatcctcaacagttcggtactgctgtccgagagcgtctcccttgtcgtcaagacccaccccgggggtcagaataagccagtcctcagagtcgcccttaggtcggttctgggcaatgaagccaaccacaaactcggggtcggatcgggcaagctcaatggtctgcttggagtactcgccagtggccagagagcccttgcaagacagctcggccagcatgagcagacctctggccagcttctcgttgggagaggggactaggaactccttgtactgggagttctcgtagtcagagacgtcctccttcttctgttcagagacagtttcctcggcaccagctcgcaggccagcaatgattccggttccgggtacaccgtgggcgttggtgatatcggaccactcggcgattcggtgacaccggtactggtgcttgacagtgttgccaatatctgcgaactttctgtcctcgaacaggaagaaaccgtgcttaagagcaagttccttgagggggagcacagtgccggcgtaggtgaagtcgtcaatgatgtcgatatgggttttgatcatgcacacataaggtccgaccttatcggcaagctcaatgagctccttggtggtggtaacatccagagaagcacacaggttggttttcttggctgccacgagcttgagcactcgagcggcaaaggcggacttgtggacgttagctcgagcttcgtaggagggcattttggtggtgaagaggagactgaaataaatttagtctgcagaactttttatcggaaccttatctggggcagtgaagtatatgttatggtaatagttacgagttagttgaacttatagatagactggactatacggctatcggtccaaattagaaagaacgtcaatggctctctgggcgtcgcctttgccgacaaaaatgtgatcatgatgaaagccagcaatgacgttgcagctgatattgttgtcggccaaccgcgccgaaaacgcagctgtcagacccacagcctccaacgaagaatgtatcgtcaaagtgatccaagcacactcatagttggagtcgtactccaaaggcggcaatgacgagtcagacagatactcgtcgactcaggcgacgacggaattcctgcagcccatctgcagaattcaggagagaccgggttggcggcgtatttgtgtcccaaaaaacagccccaattgccccggagaagacggccaggccgcctagatgacaaattcaacaactcacagctgactttctgccattgccactaggggggggcctttttatatggccaagccaagctctccacgtcggttgggctgcacccaacaataaatgggtagggttgcaccaacaaagggatgggatggggggtagaagatacgaggataacggggctcaatggcacaaataagaacgaatactgccattaagactcgtgatccagcgactgacaccattgcatcatctaagggcctcaaaactacctcggaactgctgcgctgatctggacaccacagaggttccgagcactttaggttgcaccaaatgtcccaccaggtgcaggcagaaaacgctggaacagcgtgtacagtttgtcttaacaaaaagtgagggcgctgaggtcgagcagggtggtgtgacttgttatagcctttagagctgcgaaagcgcgtatggatttggctcatcaggccagattgagggtctgtggacacatgtcatgttagtgtacttcaatcgccccctggatatagccccgacaataggccgtggcctcatttttttgccttccgcacatttccattgctcggtacccacaccttgcttctcctgcacttgccaaccttaatactggtttacattgaccaacatcttacaagcggggggcttgtctagggtatatataaacagtggctctcccaatcggttgccagtctcttttttcctttctttccccacagattcgaaatctaaactacacatcacacaatgcctgttactgacgtccttaagcgaaagtccggtgtcatcgtcggcgacgatgtccgagccgtgagtatccacgacaagatcagtgtcgagacgacgcgttttgtgtaatgacacaatccgaaagtcgctagcaacacacactctctacacaaactaacccagctctc

SEQ ID NO: 38 - DNA, 1156 bp, Artificial Sequence
  Fusion of GenBank Accession No. XP_505040 (N-terminus of Yarrowia lipolytica  ppt1 gene encoding p-hydroxybenzoate:polyprenyl transferase) and GenBank Accession No. EAQ24568 (Roseovarius sp. 217 ddsA)
ccatggtagcgttgagactggctcgagtcgtgcgaccgacaggagcctcgatccgtcacttgacatggtcccaccctgctcgactctattcgtccgtcgacaaggtgaatctgcccaaggctccctccaaggaggagctcaagactatgggtctcgacgagattgccaccaagcctcacgagcagctcgctgcccatcttgccaccaagatggaggccgtgaacgttctcatccgagaacgaatggcctcccgacacgcacctcgaatccctcaggtgactgctcaccttgttgaagctggtggaaagcgacttcgacccatgctcgttctcgccaccgctgacctctgcggatacgatggtcccttcgacgtgcatcttgctgccaccgtggagttcatccacactgccaccctcctgcatgacgatgtcgttgacgagtctgctcagagacgaggacgacccactgctaatctgctttgggacaacaagtcgtctgtccttgtcggtgactacctgtttgcacgagccttccagctcatggtggaacctggctctcttcgagtcctcgacatcctgtcgaacgcatctgctaccatcgctgaaggagaggttctgcagctctctgctgcacaggacctggctaccacagaggacatctacctccaggtcgtgcgaggtaagacagcagctctcttctctgctgccaccgaagtcggtggagtcatcgcaggagctcctgaggaccacgtcaaggctctcttcgagtacggtgacgctctcggtatagccttccagatcgtcgatgacctgcttgactaccagggtgacgtgaagtctactggcaagaacgtcggagacgacttccgagaacgaaagctcactcttcctgtcatcaaggcagtcgcagctgcctctgctgaggaacgagccttctggaagcgaaccatcgagaagggtgaccagcgagatggtgatctcgagcacgcactgaccctcatgcaggctcacggtgcacttgagcagacccgagctgaggcacttgattgggctgcacgagctcgagctgccattgccgtccttcccgaccaccctgtccagcgaatgcttgacaacctggctggatacgtcgttgctcgaatctcttaggcggccgc

SEQ ID NO: 39 - protein, 381 aa, Artificial Sequence
  Fusion of GenBank Accession No. XP_505040 (N-terminus of Yarrowia lipolytica  ppt1 gene encoding p-hydroxybenzoate:polyprenyl transferase) and GenBank Accession No. EAQ24568 (Roseovarius sp. 217 ddsA)
MVALRLARVVRPTGASIRHLTWSHPARLYSSVDKVNLPKAPSKEELKTMGLDEIATKPHEQLAAHLATKMEAVNVLIRERMASRHAPRIPQVTAHLVEAGGKRLRPMLVLATADLCGYDGPFDVHLAATVEFIHTATLLHDDVVDESAQRRGRPTANLLWDNKSSVLVGDYLFARAFQLMVEPGSLRVLDILSNASATIAEGEVLQLSAAQDLATTEDIYLQVVRGKTAALFSAATEVGGVIAGAPEDHVKALFEYGDALGIAFQIVDDLLDYQGDVKSTGKNVGDDFRERKLTLPVIKAVAAASAEERAFWKRTIEKGDQRDGDLEHALTLMQAHGALEQTRAEALDWAARARAAIAVLPDHPVQRMLDNLAGYVVARIS

SEQ ID NO: 40 - DNA, 8243 bp, Artificial Sequence
  Plasmid pDMW359-Rp_ddsA
catggtagcgttgagactggctcgagtcgtgcgaccgacaggagcctcgatccgtcacttgacatggtcccaccctgctcgactctattcgtccgtcgacaaggtgaatctgcccaaggctccctccaaggaggagctcaagactatggctgtcatcgttcccttcgagggacctcccactgcatctatcgaccagctggtcgagcttgtcgctgctgacatggaacgagtcaatgcagttatcctgtcgcgaactggttccgaggtgaccatgatacccgaggttgctaaccacctgatctcctctggaggcaagcgacttcgacccaacctgactcttgcaatggctcagctcactggttactctggagaaggtcatatcaagctggctgcagccgtcgagttcatgcacaccgccaccctgctccatgatgacgtggttgacgagtctgagatgcgacgaggtaagaagtctgctcgaatgctttggggtaacgaggcttcggtcctggttggtgacttcctccttggacaggccttccgaatgatggtggaggtcggttctcttcgagccctggatatactctcctctgctgcagccaccattgctgagggtgaggtcatgcagctcgctgcagccaagaacacagccaccactgaagacgagtacctggcagtcatccgaggcaagactgccgagctgtttgctgcagcctgcgaagtcggacctgccattgcaggtcgacccaaggctgaacagtctgcctgccgatcctttggcatgaaccttggcatcgctttccagctggttgacgatgtcctggactacggaggtaaggctgccaagcttggtaagaacgtcggtgacgatttccgagaaggcaagatcactcttcctgtcgtgctcgccttccgacgaggcaacgatgctgagcgagccttctggatcaaggctcttgagcgaggagagatcaccgaacctgaccttgaccaggccattggactcatgaccaagcaccgagctctggaggacactatccagcgagcccatcactacggtgcaatggctgttgacgcactcgctctcttccctacctctcccatgaaggcagctctcgagcaggtcgtcgctttctgtctggctcgatctcattaggcggccgcaagtgtggatggggaagtgagtgcccggttctgtgtgcacaattggcaatccaagatggatggattcaacacagggatatagcgagctacgtggtggtgcgaggatatagcaacggatatttatgtttgacacttgagaatgtacgatacaagcactgtccaagtacaatactaaacatactgtacatactcatactcgtacccgggcaacggtttcacttgagtgcagtggctagtgctcttactcgtacagtgtgcaatactgcgtatcatagtctttgatgtatatcgtattcattcatgttagttgcgtacgagccggaagcataaagtgtaaagcctggggtgcctaatgagtgagctaactcacattaattgcgttgcgctcactgcccgctttccagtcgggaaacctgtcgtgccagctgcattaatgaatcggccaacgcgcggggagaggcggtttgcgtattgggcgctcttccgcttcctcgctcactgactcgctgcgctcggtcgttcggctgcggcgagcggtatcagctcactcaaaggcggtaatacggttatccacagaatcaggggataacgcaggaaagaacatgtgagcaaaaggccagcaaaaggccaggaaccgtaaaaaggccgcgttgctggcgtttttccataggctccgcccccctgacgagcatcacaaaaatcgacgctcaagtcagaggtggcgaaacccgacaggactataaagataccaggcgtttccccctggaagctccctcgtgcgctctcctgttccgaccctgccgcttaccggatacctgtccgcctttctcccttcgggaagcgtggcgctttctcatagctcacgctgtaggtatctcagttcggtgtaggtcgttcgctccaagctgggctgtgtgcacgaaccccccgttcagcccgaccgctgcgccttatccggtaactatcgtcttgagtccaacccggtaagacacgacttatcgccactggcagcagccactggtaacaggattagcagagcgaggtatgtaggcggtgctacagagttcttgaagtggtggcctaactacggctacactagaaggacagtatttggtatctgcgctctgctgaagccagttaccttcggaaaaagagttggtagctcttgatccggcaaacaaaccaccgctggtagcggtggtttttttgtttgcaagcagcagattacgcgcagaaaaaaaggatctcaagaagatcctttgatcttttctacggggtctgacgctcagtggaacgaaaactcacgttaagggattttggtcatgagattatcaaaaaggatcttcacctagatccttttaaattaaaaatgaagttttaaatcaatctaaagtatatatgagtaaacttggtctgacagttaccaatgcttaatcagtgaggcacctatctcagcgatctgtctatttcgttcatccatagttgcctgactccccgtcgtgtagataactacgatacgggagggcttaccatctggccccagtgctgcaatgataccgcgagacccacgctcaccggctccagatttatcagcaataaaccagccagccggaagggccgagcgcagaagtggtcctgcaactttatccgcctccatccagtctattaattgttgccgggaagctagagtaagtagttcgccagttaatagtttgcgcaacgttgttgccattgctacaggcatcgtggtgtcacgctcgtcgtttggtatggcttcattcagctccggttcccaacgatcaaggcgagttacatgatcccccatgttgtgcaaaaaagcggttagctccttcggtcctccgatcgttgtcagaagtaagttggccgcagtgttatcactcatggttatggcagcactgcataattctcttactgtcatgccatccgtaagatgcttttctgtgactggtgagtactcaaccaagtcattctgagaatagtgtatgcggcgaccgagttgctcttgcccggcgtcaatacgggataataccgcgccacatagcagaactttaaaagtgctcatcattggaaaacgttcttcggggcgaaaactctcaaggatcttaccgctgttgagatccagttcgatgtaacccactcgtgcacccaactgatcttcagcatcttttactttcaccagcgtttctgggtgagcaaaaacaggaaggcaaaatgccgcaaaaaagggaataagggcgacacggaaatgttgaatactcatactcttcctttttcaatattattgaagcatttatcagggttattgtctcatgagcggatacatatttgaatgtatttagaaaaataaacaaataggggttccgcgcacatttccccgaaaagtgccacctgacgcgccctgtagcggcgcattaagcgcggcgggtgtggtggttacgcgcagcgtgaccgctacacttgccagcgccctagcgcccgctcctttcgctttcttcccttcctttctcgccacgttcgccggctttccccgtcaagctctaaatcgggggctccctttagggttccgatttagtgctttacggcacctcgaccccaaaaaacttgattagggtgatggttcacgtagtgggccatcgccctgatagacggtttttcgccctttgacgttggagtccacgttctttaatagtggactcttgttccaaactggaacaacactcaaccctatctcggtctattcttttgatttataagggattttgccgatttcggcctattggttaaaaaatgagctgatttaacaaaaatttaacgcgaattttaacaaaatattaacgcttacaatttccattcgccattcaggctgcgcaactgttgggaagggcgatcggtgcgggcctcttcgctattacgccagctggcgaaagggggatgtgctgcaaggcgattaagttgggtaacgccagggttttcccagtcacgacgttgtaaaacgacggccagtgaattgtaatacgactcactatagggcgaattgggtaccgggccccccctcgaggtcgatggtgtcgataagcttgatatcgaattcatgtcacacaaaccgatcttcgcctcaaggaaacctaattctacatccgagagactgccgagatccagtctacactgattaattttcgggccaataatttaaaaaaatcgtgttatataatattatatgtattatatatatacatcatgatgatactgacagtcatgtcccattgctaaatagacagactccatctgccgcctccaactgatgttctcaatatttaaggggtcatctcgcattgtttaataataaacagactccatctaccgcctccaaatgatgttctcaaaatatattgtatgaacttatttttattacttagtattattagacaacttacttgctttatgaaaaacacttcctatttaggaaacaatttataatggcagttcgttcatttaacaatttatgtagaataaatgttataaatgcgtatgggaaatcttaaatatggatagcataaatgatatctgcattgcctaattcgaaatcaacagcaacgaaaaaaatcccttgtacaacataaatagtcatcgagaaatatcaactatcaaagaacagctattcacacgttactattgagattattattggacgagaatcacacactcaactgtctttctctcttctagaaatacaggtacaagtatgtactattctcattgttcatacttctagtcatttcatcccacatattccttggatttctctccaatgaatgacattctatcttgcaaattcaacaattataataagatataccaaagtagcggtatagtggcaatcaaaaagcttctctggtgtgcttctcgtatttatttttattctaatgatccattaaaggtatatatttatttcttgttatataatccttttgtttattacatgggctggatacataaaggtattttgatttaattttttgcttaaattcaatcccccctcgttcagtgtcaactgtaatggtaggaaattaccatacttttgaagaagcaaaaaaaatgaaagaaaaaaaaaatcgtatttccaggttagacgttccgcagaatctagaatgcggtatgcggtacattgttcttcgaacgtaaaagttgcgctccctgagatattgtacatttttgcttttacaagtacaagtacatcgtacaactatgtactactgttgatgcatccacaacagtttgttttgtttttttttgttttttttttttctaatgattcattaccgctatgtatacctacttgtacttgtagtaagccgggttattggcgttcaattaatcatagacttatgaatctgcacggtgtgcgctgcgagttacttttagcttatgcatgctacttgggtgtaatattgggatctgttcggaaatcaacggatgctcaatcgatttcgacagtaattaattaagtcatacacaagtcagctttcttcgagcctcatataagtataagtagttcaacgtattagcactgtacccagcatctccgtatcgagaaacacaacaacatgccccattggacagatcatgcggatacacaggttgtgcagtatcatacatactcgatcagacaggtcgtctgaccatcatacaagctgaacaagcgctccatacttgcacgctctctatatacacagttaaattacatatccatagtctaacctctaacagttaatcttctggtaagcctcccagccagccttctggtatcgcttggcctcctcaataggatctcggttctggccgtacagacctcggccgacaattatgatatccgttccggtagacatgacatcctcaacagttcggtactgctgtccgagagcgtctcccttgtcgtcaagacccaccccgggggtcagaataagccagtcctcagagtcgcccttaggtcggttctgggcaatgaagccaaccacaaactcggggtcggatcgggcaagctcaatggtctgcttggagtactcgccagtggccagagagcccttgcaagacagctcggccagcatgagcagacctctggccagcttctcgttgggagaggggactaggaactccttgtactgggagttctcgtagtcagagacgtcctccttcttctgttcagagacagtttcctcggcaccagctcgcaggccagcaatgattccggttccgggtacaccgtgggcgttggtgatatcggaccactcggcgattcggtgacaccggtactggtgcttgacagtgttgccaatatctgcgaactttctgtcctcgaacaggaagaaaccgtgcttaagagcaagttccttgagggggagcacagtgccggcgtaggtgaagtcgtcaatgatgtcgatatgggttttgatcatgcacacataaggtccgaccttatcggcaagctcaatgagctccttggtggtggtaacatccagagaagcacacaggttggttttcttggctgccacgagcttgagcactcgagcggcaaaggcggacttgtggacgttagctcgagcttcgtaggagggcattttggtggtgaagaggagactgaaataaatttagtctgcagaactttttatcggaaccttatctggggcagtgaagtatatgttatggtaatagttacgagttagttgaacttatagatagactggactatacggctatcggtccaaattagaaagaacgtcaatggctctctgggcgtcgcctttgccgacaaaaatgtgatcatgatgaaagccagcaatgacgttgcagctgatattgttgtcggccaaccgcgccgaaaacgcagctgtcagacccacagcctccaacgaagaatgtatcgtcaaagtgatccaagcacactcatagttggagtcgtactccaaaggcggcaatgacgagtcagacagatactcgtcgactcaggcgacgacggaattcctgcagcccatctgcagaattcaggagagaccgggttggcggcgtatttgtgtcccaaaaaacagccccaattgccccggagaagacggccaggccgcctagatgacaaattcaacaactcacagctgactttctgccattgccactaggggggggcctttttatatggccaagccaagctctccacgtcggttgggctgcacccaacaataaatgggtagggttgcaccaacaaagggatgggatggggggtagaagatacgaggataacggggctcaatggcacaaataagaacgaatactgccattaagactcgtgatccagcgactgacaccattgcatcatctaagggcctcaaaactacctcggaactgctgcgctgatctggacaccacagaggttccgagcactttaggttgcaccaaatgtcccaccaggtgcaggcagaaaacgctggaacagcgtgtacagtttgtcttaacaaaaagtgagggcgctgaggtcgagcagggtggtgtgacttgttatagcctttagagctgcgaaagcgcgtatggatttggctcatcaggccagattgagggtctgtggacacatgtcatgttagtgtacttcaatcgccccctggatatagccccgacaataggccgtggcctcatttttttgccttccgcacatttccattgctcggtacccacaccttgcttctcctgcacttgccaaccttaatactggtttacattgaccaacatcttacaagcggggggcttgtctagggtatatataaacagtggctctcccaatcggttgccagtctcttttttcctttctttccccacagattcgaaatctaaactacacatcacacaatgcctgttactgacgtccttaagcgaaagtccggtgtcatcgtcggcgacgatgtccgagccgtgagtatccacgacaagatcagtgtcgagacgacgcgttttgtgtaatgacacaatccgaaagtcgctagcaacacacactctctacacaaactaacccagctctc

SEQ ID NO: 41 - DNA, 1165 bp, Artificial Sequence
  Fusion of GenBank Accession No. XP_505040 (N-terminus of Yarrowia lipolytica  ppt1 gene encoding p-hydroxybenzoate:polyprenyl transferase) and GenBank Accession No. ABD89877 (Rhodopseudomonas palustris BisB18 ddsA)
ccatggtagcgttgagactggctcgagtcgtgcgaccgacaggagcctcgatccgtcacttgacatggtcccaccctgctcgactctattcgtccgtcgacaaggtgaatctgcccaaggctccctccaaggaggagctcaagactatggctgtcatcgttcccttcgagggacctcccactgcatctatcgaccagctggtcgagcttgtcgctgctgacatggaacgagtcaatgcagttatcctgtcgcgaactggttccgaggtgaccatgatacccgaggttgctaaccacctgatctcctctggaggcaagcgacttcgacccaacctgactcttgcaatggctcagctcactggttactctggagaaggtcatatcaagctggctgcagccgtcgagttcatgcacaccgccaccctgctccatgatgacgtggttgacgagtctgagatgcgacgaggtaagaagtctgctcgaatgctttggggtaacgaggcttcggtcctggttggtgacttcctccttggacaggccttccgaatgatggtggaggtcggttctcttcgagccctggatatactctcctctgctgcagccaccattgctgagggtgaggtcatgcagctcgctgcagccaagaacacagccaccactgaagacgagtacctggcagtcatccgaggcaagactgccgagctgtttgctgcagcctgcgaagtcggacctgccattgcaggtcgacccaaggctgaacagtctgcctgccgatcctttggcatgaaccttggcatcgctttccagctggttgacgatgtcctggactacggaggtaaggctgccaagcttggtaagaacgtcggtgacgatttccgagaaggcaagatcactcttcctgtcgtgctcgccttccgacgaggcaacgatgctgagcgagccttctggatcaaggctcttgagcgaggagagatcaccgaacctgaccttgaccaggccattggactcatgaccaagcaccgagctctggaggacactatccagcgagcccatcactacggtgcaatggctgttgacgcactcgctctcttccctacctctcccatgaaggcagctctcgagcaggtcgtcgctttctgtctggctcgatctcattaggcggccgc

SEQ ID NO: 42 - protein, 384 aa, Artificial Sequence
  Fusion of GenBank Accession No. XP_505040 (N-terminus of Yarrowia lipolytica  ppt1 gene encoding p-hydroxybenzoate:polyprenyl transferase) and GenBank Accession No. ABD89877 (Rhodopseudomonas palustris BisB18 ddsA)
MVALRLARVVRPTGASIRHLTWSHPARLYSSVDKVNLPKAPSKEELKTMAVIVPFEGPPTASIDQLVELVAADMERVNAVILSRTGSEVTMIPEVANHLISSGGKRLRPNLTLAMAQLTGYSGEGHIKLAAAVEFMHTATLLHDDVVDESEMRRGKKSARMLWGNEASVLVGDFLLGQAFRMMVEVGSLRALDILSSAAATIAEGEVMQLAAAKNTATTEDEYLAVIRGKTAELFAAACEVGPAIAGRPKAEQSACRSFGMNLGIAFQLVDDVLDYGGKAAKLGKNVGDDFREGKITLPVVLAFRRGNDAERAFWIKALERGEITEPDLDQAIGLMTKHRALEDTIQRAHHYGAMAVDALALFPTSPMKAALEQVVAFCLARSH

SEQ ID NO: 43 - DNA, 14688 bp, Artificial Sequence
  Plasmid pZKLeuN-29E3
cgattgttgtctactaactatcgtacgataacttcgtatagcatacattatacgaagttatcgcgtcgacgagtatctgtctgactcgtcattgccgcctttggagtacgactccaactatgagtgtgcttggatcactttgacgatacattcttcgttggaggctgtgggtctgacagctgcgttttcggcgcggttggccgacaacaatatcagctgcaacgtcattgctggctttcatcatgatcacatttttgtcggcaaaggcgacgcccagagagccattgacgttctttctaatttggaccgatagccgtatagtccagtctatctataagttcaactaactcgtaactattaccataacatatacttcactgccccagataaggttccgataaaaagttctgcagactaaatttatttcagtctcctcttcaccaccaaaatgccctcctacgaagctcgagctaacgtccacaagtccgcctttgccgctcgagtgctcaagctcgtggcagccaagaaaaccaacctgtgtgcttctctggatgttaccaccaccaaggagctcattgagcttgccgataaggtcggaccttatgtgtgcatgatcaaaacccatatcgacatcattgacgacttcacctacgccggcactgtgctccccctcaaggaacttgctcttaagcacggtttcttcctgttcgaggacagaaagttcgcagatattggcaacactgtcaagcaccagtaccggtgtcaccgaatcgccgagtggtccgatatcaccaacgcccacggtgtacccggaaccggaatcattgctggcctgcgagctggtgccgaggaaactgtctctgaacagaagaaggaggacgtctctgactacgagaactcccagtacaaggagttcctagtcccctctcccaacgagaagctggccagaggtctgctcatgctggccgagctgtcttgcaagggctctctggccactggcgagtactccaagcagaccattgagcttgcccgatccgaccccgagtttgtggttggcttcattgcccagaaccgacctaagggcgactctgaggactggcttattctgacccccggggtgggtcttgacgacaagggagacgctctcggacagcagtaccgaactgttgaggatgtcatgtctaccggaacggatatcataattgtcggccgaggtctgtacggccagaaccgagatcctattgaggaggccaagcgataccagaaggctggctgggaggcttaccagaagattaactgttagaggttagactatggatatgtaatttaactgtgtatatagagagcgtgcaagtatggagcgcttgttcagcttgtatgatggtcagacgacctgtctgatcgagtatgtatgatactgcacaacctgtgtatccgcatgatctgtccaatggggcatgttgttgtgtttctcgatacggagatgctgggtacagtgctaatacgttgaactacttatacttatatgaggctcgaagaaagctgacttgtgtatgacttattctcaactacatccccagtcacaataccaccactgcactaccactacaccaaaaccatgatcaaaccacccatggacttcctggaggcagaagaacttgttatggaaaagctcaagagagagatcataacttcgtatagcatacattatacgaagttatcctgcaggtaaaggaattctggagtttctgagagaaaaaggcaagatacgtatgtaacaaagcgacgcatggtacaataataccggaggcatgtatcatagagagttagtggttcgatgatggcactggtgcctggtatgactttatacggctgactacatatttgtcctcagacatacaattacagtcaagcacttacccttggacatctgtaggtaccccccggccaagacgatctcagcgtgtcgtatgtcggattggcgtagctccctcgctcgtcaattggctcccatctactttcttctgcttggctacacccagcatgtctgctatggctcgttttcgtgccttatctatcctcccagtattaccaactctaaatgacatgatgtgattgggtctacactttcatatcagagataaggagtagcacagttgcataaaaagcccaactctaatcagcttcttcctttcttgtaattagtacaaaggtgattagcgaaatctggaagcttagttggccctaaaaaaatcaaaaaaagcaaaaaacgaaaaacgaaaaaccacagttttgagaacagggaggtaacgaaggatcgtatatatatatatatatatatatacccacggatcccgagaccggcctttgattcttccctacaaccaaccattctcaccaccctaattcacaaccatggagtctggacccatgcctgctggcattcccttccctgagtactatgacttctttatggactggaagactcccctggccatcgctgccacctacactgctgccgtcggtctcttcaaccccaaggttggcaaggtctcccgagtggttgccaagtcggctaacgcaaagcctgccgagcgaacccagtccggagctgccatgactgccttcgtctttgtgcacaacctcattctgtgtgtctactctggcatcaccttctactacatgtttcctgctatggtcaagaacttccgaacccacacactgcacgaagcctactgcgacacggatcagtccctctggaacaacgcacttggctactggggttacctcttctacctgtccaagttctacgaggtcattgacaccatcatcatcatcctgaagggacgacggtcctcgctgcttcagacctaccaccatgctggagccatgattaccatgtggtctggcatcaactaccaagccactcccatttggatctttgtggtcttcaactccttcattcacaccatcatgtactgttactatgccttcacctctatcggattccatcctcctggcaaaaagtacctgacttcgatgcagattactcagtttctggtcggtatcaccattgccgtgtcctacctcttcgttcctggctgcatccgaacacccggtgctcagatggctgtctggatcaacgtcggctacctgtttcccttgacctatctgttcgtggactttgccaagcgaacctactccaagcgatctgccattgccgctcagaaaaaggctcagtaagcggccgcattgatgattggaaacacacacatgggttatatctaggtgagagttagttggacagttatatattaaatcagctatgccaacggtaacttcattcatgtcaacgaggaaccagtgactgcaagtaatatagaatttgaccaccttgccattctcttgcactcctttactatatctcatttatttcttatatacaaatcacttcttcttcccagcatcgagctcggaaacctcatgagcaataacatcgtggatctcgtcaatagagggctttttggactccttgctgttggccaccttgtccttgctgtctggctcattctgtttcaacgccttttaattaacggagtaggtctcggtgtcggaagcgacgccagatccgtcatcctcctttcgctctccaaagtagatacctccgacgagctctcggacaatgatgaagtcggtgccctcaacgtttcggatgggggagagatcggcgagcttgggcgacagcagctggcagggtcgcaggttggcgtacaggttcaggtcctttcgcagcttgaggagaccctgctcgggtcgcacgtcggttcgtccgtcgggagtggtccatacggtgttggcagcgcctccgacagcaccgagcataatagagtcagcctttcggcagatgtcgagagtagcgtcggtgatgggctcgccctccttctcaatggcagctcctccaatgagtcggtcctcaaacacaaactcggtgccggaggcctcagcaacagacttgagcaccttgacggcctcggcaatcacctcggggccacagaagtcgccgccgagaagaacaatcttcttggagtcagtcttggtcttcttagtttcgggttccattgtggatgtgtgtggttgtatgtgtgatgtggtgtgtggagtgaaaatctgtggctggcaaacgctcttgtatatatacgcacttttgcccgtgctatgtggaagactaaacctccgaagattgtgactcaggtagtgcggtatcggctagggacccaaaccttgtcgatgccgatagcatgcgacgtcgggcccaattcgccctatagtgagtcgtattacaattcactggccgtcgttttacaacgtcgtgactgggaaaaccctggcgttacccaacttaatcgccttgcagcacatccccctttcgccagctggcgtaatagcgaagaggcccgcaccgatcgcccttcccaacagttgcgcagcctgaatggcgaatggacgcgccctgtagcggcgcattaagcgcggcgggtgtggtggttacgcgcagcgtgaccgctacacttgccagcgccctagcgcccgctcctttcgctttcttcccttcctttctcgccacgttcgccggctttccccgtcaagctctaaatcgggggctccctttagggttccgatttagtgctttacggcacctcgaccccaaaaaacttgattagggtgatggttcacgtagtgggccatcgccctgatagacggtttttcgccctttgacgttggagtccacgttctttaatagtggactcttgttccaaactggaacaacactcaaccctatctcggtctattcttttgatttataagggattttgccgatttcggcctattggttaaaaaatgagctgatttaacaaaaatttaacgcgaattttaacaaaatattaacgcttacaatttcctgatgcggtattttctccttacgcatctgtgcggtatttcacaccgcatcaggtggcacttttcggggaaatgtgcgcggaacccctatttgtttatttttctaaatacattcaaatatgtatccgctcatgagacaataaccctgataaatgcttcaataatattgaaaaaggaagagtatgagtattcaacatttccgtgtcgcccttattcccttttttgcggcattttgccttcctgtttttgctcacccagaaacgctggtgaaagtaaaagatgctgaagatcagttgggtgcacgagtgggttacatcgaactggatctcaacagcggtaagatccttgagagttttcgccccgaagaacgttttccaatgatgagcacttttaaagttctgctatgtggcgcggtattatcccgtattgacgccgggcaagagcaactcggtcgccgcatacactattctcagaatgacttggttgagtactcaccagtcacagaaaagcatcttacggatggcatgacagtaagagaattatgcagtgctgccataaccatgagtgataacactgcggccaacttacttctgacaacgatcggaggaccgaaggagctaaccgcttttttgcacaacatgggggatcatgtaactcgccttgatcgttgggaaccggagctgaatgaagccataccaaacgacgagcgtgacaccacgatgcctgtagcaatggcaacaacgttgcgcaaactattaactggcgaactacttactctagcttcccggcaacaattaatagactggatggaggcggataaagttgcaggaccacttctgcgctcggcccttccggctggctggtttattgctgataaatctggagccggtgagcgtgggtctcgcggtatcattgcagcactggggccagatggtaagccctcccgtatcgtagttatctacacgacggggagtcaggcaactatggatgaacgaaatagacagatcgctgagataggtgcctcactgattaagcattggtaactgtcagaccaagtttactcatatatactttagattgatttaaaacttcatttttaatttaaaaggatctaggtgaagatcctttttgataatctcatgaccaaaatcccttaacgtgagttttcgttccactgagcgtcagaccccgtagaaaagatcaaaggatcttcttgagatcctttttttctgcgcgtaatctgctgcttgcaaacaaaaaaaccaccgctaccagcggtggtttgtttgccggatcaagagctaccaactctttttccgaaggtaactggcttcagcagagcgcagataccaaatactgttcttctagtgtagccgtagttaggccaccacttcaagaactctgtagcaccgcctacatacctcgctctgctaatcctgttaccagtggctgctgccagtggcgataagtcgtgtcttaccgggttggactcaagacgatagttaccggataaggcgcagcggtcgggctgaacggggggttcgtgcacacagcccagcttggagcgaacgacctacaccgaactgagatacctacagcgtgagctatgagaaagcgccacgcttcccgaagggagaaaggcggacaggtatccggtaagcggcagggtcggaacaggagagcgcacgagggagcttccagggggaaacgcctggtatctttatagtcctgtcgggtttcgccacctctgacttgagcgtcgatttttgtgatgctcgtcaggggggcggagcctatggaaaaacgccagcaacgcggcctttttacggttcctggccttttgctggccttttgctcacatgttctttcctgcgttatcccctgattctgtggataaccgtattaccgcctttgagtgagctgataccgctcgccgcagccgaacgaccgagcgcagcgagtcagtgagcgaggaagcggaagagcgcccaatacgcaaaccgcctctccccgcgcgttggccgattcattaatgcagctggcgcgcccactgagctcgtctaacggacttgatatacaaccaattaaaacaaatgaaaagaaatacagttctttgtatcatttgtaacaattaccctgtacaaactaaggtattgaaatcccacaatattcccaaagtccacccctttccaaattgtcatgcctacaactcatataccaagcactaacctaccaaacaccactaaaaccccacaaaatatatcttaccgaatatacagtaacaagctaccaccacactcgttgggtgcagtcgccagcttaaagatatctatccacatcagccacaactcccttcctttaataaaccgactacacccttggctattgaggttatgagtgaatatactgtagacaagacactttcaagaagactgtttccaaaacgtaccactgtcctccactacaaacacacccaatctgcttcttctagtcaaggttgctacaccggtaaattataaatcatcatttcattagcagggcagggccctttttatagagtcttatacactagcggaccctgccggtagaccaacccgcaggcgcgtcagtttgctccttccatcaatgcgtcgtagaaacgacttactccttcttgagcagctccttgaccttgttggcaacaagtctccgacctcggaggtggaggaagagcctccgatatcggcggtagtgataccagcctcgacggactccttgacggcagcctcaacagcgtcaccggcgggcttcatgttaagagagaacttgagcatcatggcggcagacagaatggtggcgtacgcaactaacatgaatgaatacgatatacatcaaagactatgatacgcagtattgcacactgtacgagtaagagcactagccactgcactcaagtgaaaccgttgcccgggtacgagtatgagtatgtacagtatgtttagtattgtacttggacagtgcttgtatcgtacattctcaagtgtcaaacataaatatccgttgctatatcctcgcaccaccacgtagctcgctatatccctgtgttgaatccatccatcttggattgccaattgtgcacacagaaccgggcactcacttccccatccacacttgcggccgcttaagcaacgggcttgataacagcggggggggtgcccacgttgttgcggttgcggaagaacagaacacccttaccagcaccctcggcaccagcgctgggctcaacccactggcacatacgcgcactgcggtacatggcgcggatgaagccacgaggaccatcctggacatcagcccggtagtgcttgcccatgatgggcttaatggcctcggtggcctcgtccgcgttgtagaaggggatgctgctgacgtagtggtggaggacatgagtctcgatgatgccgtggagaaggtggcggccgatgaagcccatctcacggtcaatggtagcagcggcaccacggacgaagttccactcgtcgttggtgtagtggggaagggtagggtcggtgtgctggaggaaggtgatggcaacgagccagtggttaacccagaggtagggaacaaagtaccagatggccatgttgtagaaaccgaacttctgaacgaggaagtacagagcagtggccatcagaccgataccaatatcgctgaggacgatgagcttagcgtcactgttctcgtacagagggctgcggggatcgaagtggttaacaccaccgccgaggccgttatgcttgcccttgccgcgaccctcacgctggcgctcgtggtagttgtggccggtaacattggtgatgaggtagttgggccagccaacgagctgctgaaggacgagcatgagaagagtgaaagcgggggtctcctcagtaagatgagcgagctcgtgggtcatctttccgagacgagtagcctgctgctcgcgggttcggggaacgaagaccatgtcacgctccatgttgccagtggccttgtggtgctttcggtgggagatttgccagctgaagtaggggacaaggagggaagagtgaagaacccagccagtaatgtcgttgatgatgcgagaatcggagaaagcaccgtgaccgcactcatgggcaataacccagagaccagtaccgaaaagaccctgaagaacggtgtacacggcccacagaccagcgcgggcgggggtggaggggatatattcgggggtcacaaagttgtaccagatgctgaaagtggtagtcaggaggacaatgtcgcggaggatataaccgtatcccttgagagcggagcgcttgaagcagtgcttagggatggcattgtagatgtccttgatggtaaagtcgggaacctcgaactggttgccgtaggtgtcgagcatgacaccatactcggacttgggcttggcgatatcaacctcggacatggacgagagcgatgtggaagaggccgagtggcggggagagtctgaaggagagacggcggcagactcagaatccgtcacagtagttgaggtgacggtgcgtctaagcgcagggttctgcttgggcagagccgaagtggacgccatggttgatgtgtgtttaattcaagaatgaatatagagaagagaagaagaaaaaagattcaattgagccggcgatgcagacccttatataaatgttgccttggacagacggagcaagcccgcccaaacctacgttcggtataatatgttaagctttttaacacaaaggtttggcttggggtaacctgatgtggtgcaaaagaccgggcgttggcgagccattgcgcgggcgaatggggccgtgactcgtctcaaattcgagggcgtgcctcaattcgtgcccccgtggctttttcccgccgtttccgccccgtttgcaccactgcagccgcttctttggttcggacaccttgctgcgagctaggtgccttgtgctacttaaaaagtggcctcccaacaccaacatgacatgagtgcgtgggccaagacacgttggcggggtcgcagtcggctcaatggcccggaaaaaacgctgctggagctggttcggacgcagtccgccgcggcgtatggatatccgcaaggttccatagcgccattgccctccgtcggcgtctatcccgcaacctctaaatagagcgggaatataacccaagcttcttttttttcctttaacacgcacacccccaactatcatgttgctgctgctgtttgactctactctgtggaggggtgctcccacccaacccaacctacaggtggatccggcgctgtgattggctgataagtctcctatccggactaattctgaccaatgggacatgcgcgcaggacccaaatgccgcaattacgtaaccccaacgaaatgcctacccctctttggagcccagcggccccaaatccccccaagcagcccggttctaccggcttccatctccaagcacaagcagcccggttctaccggcttccatctccaagcacccctttctccacaccccacaaaaagacccgtgcaggacatcctactgcgtcgacatcatttaaattccttcacttcaagttcattcttcatctgcttctgttttactttgacaggcaaatgaagacatggtacgacttgatggaggccaagaacgccatttcaccccgagacaccgaagtgcctgaaatcctggctgcccccattgataacatcggaaactacggtattccggaaagtgtatatagaacctttccccagcttgtgtctgtggatatggatggtgtaatcccctttgagtactcgtcttggcttctctccgagcagtatgaggctctctaatctagcgcatttaatatctcaatgtatttatatatttatcttctcatgcggccgctcactgaatctttttggctcccttgtgcttcctgacgatatacgtttgcacatagaaattcaagaacaaacacaagactgtgccaacataaaagtaattgaagaaccagccaaacatcctcatcccatcttggcgataacagggaatgttcctgtacttccagacaatgtagaaaccaacattgaattgaatgatctgcattgatgtaatcagggattttggcatggggaacttcagcttgatcaatctggtccaataataaccgtacatgatccagtggatgaaaccattcaacagcacaaaaatccaaacagcttcatttcggtaattatagaacagccacatatccatcggtgcccccaaatgatggaagaattgcaaccaggtcagaggcttgcccatcagtggcaaatagaaggagtcaatatactccaggaacttgctcaaatagaacaactgcgtggtgatcctgaagacgttgttgtcaaaagccttctcgcagttgtcagacataacaccgatggtgtacatggcatatgccattgagaggaatgatcccaacgaataaatggacatgagaaggttgtaattggtgaaaacaaacttcatacgagactgaccttttggaccaagggggccaagagtgaacttcaagatgacaaatgcgatggacaagtaaagcacctcacagtgactggcatcactccagagttgggcataatcaactggttgggtaaaacttcctgcccaattgagactatttcattcaccacctccatggccattgctgtagatatgtcttgtgtgtaagggggttggggtggttgtttgtgttcttgacttttgtgttagcaagggaagacgggcaaaaaagtgagtgtggttgggagggagagacgagccttatatataatgcttgtttgtgtttgtgcaagtggacgccgaaacgggcaggagccaaactaaacaaggcagacaatgcgagcttaattggattgcctgatgggcaggggttagggctcgatcaatgggggtgcgaagtgacaaaattgggaattaggttcgcaagcaaggctgacaagactttggcccaaacatttgtacgcggtggacaacaggagccacccatcgtctgtcacgggctagccggtcgtgcgtcctgtcaggctccacctaggctccatgccactccatacaatcccactagtgtaccgctaggccgcttttagctcccatctaagacccccccaaaacctccactgtacagtgcactgtactgtgtggcgatcaagggcaagggaaaaaaggcgcaaacatgcacgcatggaatgacgtaggtaaggcgttactagactgaaaagtggcacatttcggcgtgccaaagggtcctaggtgcgtttcgcgagctgggcgccaggccaagccgctccaaaacgcctctccgactccctccagcggcctccatatccccatccctctccacagcaatgttgttaagccttgcaaacgaaaaaatagaaaggctaataagcttccaatattgtggtgtacgctgcataacgcaacaatgagcgccaaacaacacacacacacagcacacagcagcattaaccacgatgaacagcatgacattacaggtgggtgtgtaatcagggccctgattgctggtggtgggagcccccatcatgggcagatctgcgtacactgtttaaacagtgtacgcagatctactatagaggaacatttaaattgccccggagaagacggccaggccgcctagatgacaaattcaacaactcacagctgactttctgccattgccactaggggggggcctttttatatggccaagccaagctctccacgtcggttgggctgcacccaacaataaatgggtagggttgcaccaacaaagggatgggatggggggtagaagatacgaggataacggggctcaatggcacaaataagaacgaatactgccattaagactcgtgatccagcgactgacaccattgcatcatctaagggcctcaaaactacctcggaactgctgcgctgatctggacaccacagaggttccgagcactttaggttgcaccaaatgtcccaccaggtgcaggcagaaaacgctggaacagcgtgtacagtttgtcttaacaaaaagtgagggcgctgaggtcgagcagggtggtgtgacttgttatagcctttagagctgcgaaagcgcgtatggatttggctcatcaggccagattgagggtctgtggacacatgtcatgttagtgtacttcaatcgccccctggatatagccccgacaataggccgtggcctcatttttttgccttccgcacatttccattgctcgatacccacaccttgcttctcctgcacttgccaaccttaatactggtttacattgaccaacatcttacaagcggggggcttgtctagggtatatataaacagtggctctcccaatcggttgccagtctcttttttcctttctttccccacagattcgaaatctaaactacacatcacagaattccgagccgtgagtatccacgacaagatcagtgtcgagacgacgcgttttgtgtaatgacacaatccgaaagtcgctagcaacacacactctctacacaaactaacccagctctggtaccatggaggtcgtgaacgaaatcgtctccattggccaggaggttcttcccaaggtcgactatgctcagctctggtctgatgcctcgcactgcgaggtgctgtacctctccatcgccttcgtcatcctgaagttcacccttggtcctctcggacccaagggtcagtctcgaatgaagtttgtgttcaccaactacaacctgctcatgtccatctactcgctgggctccttcctctctatggcctacgccatgtacaccattggtgtcatgtccgacaactgcgagaaggctttcgacaacaatgtcttccgaatcaccactcagctgttctacctcagcaagttcctcgagtacattgactccttctatctgcccctcatgggcaagcctctgacctggttgcagttctttcaccatctcggagctcctatggacatgtggctgttctacaactaccgaaacgaagccgtttggatctttgtgctgctcaacggcttcattcactggatcatgtacggctactattggacccgactgatcaagctcaagttccctatgcccaagtccctgattacttctatgcagatcattcagttcaacgttggcttctacatcgtctggaagtaccggaacattccctgctaccgacaagatggaatgagaatgtttggctggtttttcaactacttctacgttggtactgtcctgtgtctgttcctcaacttctacgtgcagacctacatcgtccgaaagcacaagggagccaaaaagattcagtgagcggccgcatgtacatacaagattatttatagaaatgaatcgcgatcgaacaaagagtacgagtgtacgagtaggggatgatgataaaagtggaagaagttccgcatctttggatttatcaacgtgtaggacgatacttcctgtaaaaatgcaatgtctttaccataggttctgctgtagatgttattaactaccattaacatgtctacttgtacagttgcagaccagttggagtatagaatggtacacttaccaaaaagtgttgatggttgtaactacgatatataaaactgttgacgggatccccgctgatatgcctaaggaacaatcaaagaggaagatattaattcagaatgctagtatacagttagggat

SEQ ID NO: 44 - DNA, 1434 bp, Fusarium monoliforme
  CDS (1)..(1434): delta-12 desaturase
  ref <302>: TITLE: DELTA-12 DESATURASES SUITABLE FOR ALTERING LEVELS OF POLYUNSATURATED FATTY ACIDS IN OLEAGINOUS YEAST
  ref <310>: PATENT DOCUMENT NUMBER: WO 2005/047485
  ref <311>: PATENT FILING DATE: 2004-11-12
  ref <312>: PUBLICATION DATE: 2005-05-26
  ref <313>: RELEVANT RESIDUES IN SEQ ID NO: (1)..(1434)
  ref <302>: TITLE: DELTA-12 DESATURASES SUITABLE FOR ALTERING LEVELS OF POLYUNSATURATED FATTY ACIDS IN OLEAGINOUS YEAST
  ref <310>: PATENT DOCUMENT NUMBER: US 2005-0216975-A1
  ref <311>: PATENT FILING DATE: 2004-11-10
  ref <312>: PUBLICATION DATE: 2005-09-29
  ref <313>: RELEVANT RESIDUES IN SEQ ID NO: (1)..(1434)
atggcgtccacttcggctctgcccaagcagaaccctgcgcttagacgcaccgtcacctcaactactgtgacggattctgagtctgccgccgtctctccttcagactctccccgccactcggcctcttccacatcgctctcgtccatgtccgaggttgatatcgccaagcccaagtccgagtatggtgtcatgctcgacacctacggcaaccagttcgaggttcccgactttaccatcaaggacatctacaatgccatccctaagcactgcttcaagcgctccgctctcaagggatacggttatatcctccgcgacattgtcctcctgactaccactttcagcatctggtacaactttgtgacccccgaatatatcccctccacccccgcccgcgctggtctgtgggccgtgtacaccgttcttcagggtcttttcggtactggtctctgggttattgcccatgagtgcggtcacggtgctttctccgattctcgcatcatcaacgacattactggctgggttcttcactcttccctccttgtcccctacttcagctggcaaatctcccaccgaaagcaccacaaggccactggcaacatggagcgtgacatggtcttcgttccccgaacccgcgagcagcaggctactcgtctcggaaagatgacccacgagctcgctcatcttactgaggagacccccgctttcactcttctcatgctcgtccttcagcagctcgttggctggcccaactacctcatcaccaatgttaccggccacaactaccacgagcgccagcgtgagggtcgcggcaagggcaagcataacggcctcggcggtggtgttaaccacttcgatccccgcagccctctgtacgagaacagtgacgctaagctcatcgtcctcagcgatattggtatcggtctgatggccactgctctgtacttcctcgttcagaagttcggtttctacaacatggccatctggtactttgttccctacctctgggttaaccactggctcgttgccatcaccttcctccagcacaccgaccctacccttccccactacaccaacgacgagtggaacttcgtccgtggtgccgctgctaccattgaccgtgagatgggcttcatcggccgccaccttctccacggcatcatcgagactcatgtcctccaccactacgtcagcagcatccccttctacaacgcggacgaggccaccgaggccattaagcccatcatgggcaagcactaccgggctgatgtccaggatggtcctcgtggcttcatccgcgccatgtaccgcagtgcgcgtatgtgccagtgggttgagcccagcgctggtgccgagggtgctggtaagggtgttctgttcttccgcaaccgcaacaacgtgggcaccccccccgctgttatcaagcccgttgcttaa

SEQ ID NO: 45 - protein, 477 aa, Fusarium monoliforme
MASTSALPKQNPALRRTVTSTTVTDSESAAVSPSDSPRHSASSTSLSSMSEVDIAKPKSEYGVMLDTYGNQFEVPDFTIKDIYNAIPKHCFKRSALKGYGYILRDIVLLTTTFSIWYNFVTPEYIPSTPARAGLWAVYTVLQGLFGTGLWVIAHECGHGAFSDSRIINDITGWVLHSSLLVPYFSWQISHRKHHKATGNMERDMVFVPRTREQQATRLGKMTHELAHLTEETPAFTLLMLVLQQLVGWPNYLITNVTGHNYHERQREGRGKGKHNGLGGGVNHFDPRSPLYENSDAKLIVLSDIGIGLMATALYFLVQKFGFYNMAIWYFVPYLWVNHWLVAITFLQHTDPTLPHYTNDEWNFVRGAAATIDREMGFIGRHLLHGIIETHVLHHYVSSIPFYNADEATEAIKPIMGKHYRADVQDGPRGFIRAMYRSARMCQWVEPSAGAEGAGKGVLFFRNRNNVGTPPAVIKPVA

SEQ ID NO: 46 - DNA, 777 bp, Euglena gracilis
  CDS (1)..(777): synthetic delta-9 elongase (codon-optimized for Yarrowia lipolytica)
  ref <302>: TITLE: DELTA-9 ELONGASES AND THEIR USE IN MAKING POLYUNSATURATED FATTY ACIDS
  ref <310>: PATENT DOCUMENT NUMBER: WO 2007/061742
  ref <311>: PATENT FILING DATE: 2006-11-16
  ref <312>: PUBLICATION DATE: 2007-05-31
  ref <313>: RELEVANT RESIDUES IN SEQ ID NO: (1)..(777)
  ref <302>: TITLE: DELTA-9 ELONGASES AND THEIR USE IN MAKING POLYUNSATURATED FATTY ACIDS
  ref <310>: PATENT DOCUMENT NUMBER: US-2007-0117190-A1
  ref <311>: PATENT FILING DATE: 2006-11-16
  ref <312>: PUBLICATION DATE: 2007-05-24
  ref <313>: RELEVANT RESIDUES IN SEQ ID NO: (1)..(777)
atggaggtcgtgaacgaaatcgtctccattggccaggaggttcttcccaaggtcgactatgctcagctctggtctgatgcctcgcactgcgaggtgctgtacctctccatcgccttcgtcatcctgaagttcacccttggtcctctcggacccaagggtcagtctcgaatgaagtttgtgttcaccaactacaacctgctcatgtccatctactcgctgggctccttcctctctatggcctacgccatgtacaccattggtgtcatgtccgacaactgcgagaaggctttcgacaacaatgtcttccgaatcaccactcagctgttctacctcagcaagttcctcgagtacattgactccttctatctgcccctcatgggcaagcctctgacctggttgcagttctttcaccatctcggagctcctatggacatgtggctgttctacaactaccgaaacgaagccgtttggatctttgtgctgctcaacggcttcattcactggatcatgtacggctactattggacccgactgatcaagctcaagttccctatgcccaagtccctgattacttctatgcagatcattcagttcaacgttggcttctacatcgtctggaagtaccggaacattccctgctaccgacaagatggaatgagaatgtttggctggtttttcaactacttctacgttggtactgtcctgtgtctgttcctcaacttctacgtgcagacctacatcgtccgaaagcacaagggagccaaaaagattcagtga

SEQ ID NO: 47 - protein, 258 aa, Euglena gracilis; identical to SEQ ID NO: 4

SEQ ID NO: 48 - DNA, 34 bp, Escherichia coli
ataacttcgtataatgtatgctatacgaagttat

SEQ ID NO: 49 - DNA, 828 bp, Mortierella alpina
  CDS (1)..(828): synthetic C16/18 elongase (codon-optimized for Yarrowia lipolytica)
  ref <302>: TITLE: A MORTIERELLA ALPINA C16/18 FATTY ACID ELONGASE
  ref <310>: PATENT DOCUMENT NUMBER: US 2007-0087420-A1
  ref <311>: PATENT FILING DATE: 2005-10-19
  ref <312>: PUBLICATION DATE: 2007-04-19
  ref <313>: RELEVANT RESIDUES IN SEQ ID NO: (1)..(828)
  ref <302>: TITLE: A MORTIERELLA ALPINA C16/18 FATTY ACID ELONGASE
  ref <310>: PATENT DOCUMENT NUMBER: WO 2007/046817
  ref <311>: PATENT FILING DATE: 2005-11-04
  ref <312>: PUBLICATION DATE: 2007-04-26
  ref <313>: RELEVANT RESIDUES IN SEQ ID NO: (1)..(828)
atggagtctggacccatgcctgctggcattcccttccctgagtactatgacttctttatggactggaagactcccctggccatcgctgccacctacactgctgccgtcggtctcttcaaccccaaggttggcaaggtctcccgagtggttgccaagtcggctaacgcaaagcctgccgagcgaacccagtccggagctgccatgactgccttcgtctttgtgcacaacctcattctgtgtgtctactctggcatcaccttctactacatgtttcctgctatggtcaagaacttccgaacccacacactgcacgaagcctactgcgacacggatcagtccctctggaacaacgcacttggctactggggttacctcttctacctgtccaagttctacgaggtcattgacaccatcatcatcatcctgaagggacgacggtcctcgctgcttcagacctaccaccatgctggagccatgattaccatgtggtctggcatcaactaccaagccactcccatttggatctttgtggtcttcaactccttcattcacaccatcatgtactgttactatgccttcacctctatcggattccatcctcctggcaaaaagtacctgacttcgatgcagattactcagtttctggtcggtatcaccattgccgtgtcctacctcttcgttcctggctgcatccgaacacccggtgctcagatggctgtctggatcaacgtcggctacctgtttcccttgacctatctgttcgtggactttgccaagcgaacctactccaagcgatctgccattgccgctcagaaaaaggctcagtaa

SEQ ID NO: 50 - protein, 275 aa, Mortierella alpina
MESGPMPAGIPFPEYYDFFMDWKTPLAIAATYTAAVGLFNPKVGKVSRVVAKSANAKPAERTQSGAAMTAFVFVHNLILCVYSGITFYYMFPAMVKNFRTHTLHEAYCDTDQSLWNNALGYWGYLFYLSKFYEVIDTIIIILKGRRSSLLQTYHHAGAMITMWSGINYQATPIWIFVVFNSFIHTIMYCYYAFTSIGFHPPGKKYLTSMQITQFLVGITIAVSYLFVPGCIRTPGAQMAVWINVGYLFPLTYLFVDFAKRTYSKRSAIAAQKKAQ

SEQ ID NO: 51 - DNA, 8739 bp, Artificial Sequence
  Plasmid pY116
ggccgccaccgcggcccgagattccggcctcttcggccgccaagcgacccgggtggacgtctagaggtacctagcaattaacagatagtttgccggtgataattctcttaacctcccacactcctttgacataacgatttatgtaacgaaactgaaatttgaccagatattgtgtccgcggtggagctccagcttttgttccctttagtgagggtttaaacgagcttggcgtaatcatggtcatagctgtttcctgtgtgaaattgttatccgctcacaattccacacaacgtacgagccggaagcataaagtgtaaagcctggggtgcctaatgagtgagctaactcacattaattgcgttgcgctcactgcccgctttccagtcgggaaacctgtcgtgccagctgcattaatgaatcggccaacgcgcggggagaggcggtttgcgtattgggcgctcttccgcttcctcgctcactgactcgctgcgctcggtcgttcggctgcggcgagcggtatcagctcactcaaaggcggtaatacggttatccacagaatcaggggataacgcaggaaagaacatgtgagcaaaaggccagcaaaaggccaggaaccgtaaaaaggccgcgttgctggcgtttttccataggctccgcccccctgacgagcatcacaaaaatcgacgctcaagtcagaggtggcgaaacccgacaggactataaagataccaggcgtttccccctggaagctccctcgtgcgctctcctgttccgaccctgccgcttaccggatacctgtccgcctttctcccttcgggaagcgtggcgctttctcatagctcacgctgtaggtatctcagttcggtgtaggtcgttcgctccaagctgggctgtgtgcacgaaccccccgttcagcccgaccgctgcgccttatccggtaactatcgtcttgagtccaacccggtaagacacgacttatcgccactggcagcagccactggtaacaggattagcagagcgaggtatgtaggcggtgctacagagttcttgaagtggtggcctaactacggctacactagaaggacagtatttggtatctgcgctctgctgaagccagttaccttcggaaaaagagttggtagctcttgatccggcaaacaaaccaccgctggtagcggtggtttttttgtttgcaagcagcagattacgcgcagaaaaaaaggatctcaagaagatcctttgatcttttctacggggtctgacgctcagtggaacgaaaactcacgttaagggattttggtcatgagattatcaaaaaggatcttcacctagatccttttaaattaaaaatgaagttttaaatcaatctaaagtatatatgagtaaacttggtctgacagttaccaatgcttaatcagtgaggcacctatctcagcgatctgtctatttcgttcatccatagttgcctgactccccgtcgtgtagataactacgatacgggagggcttaccatctggccccagtgctgcaatgataccgcgagacccacgctcaccggctccagatttatcagcaataaaccagccagccggaagggccgagcgcagaagtggtcctgcaactttatccgcctccatccagtctattaattgttgccgggaagctagagtaagtagttcgccagttaatagtttgcgcaacgttgttgccattgctacaggcatcgtggtgtcacgctcgtcgtttggtatggcttcattcagctccggttcccaacgatcaaggcgagttacatgatcccccatgttgtgcaaaaaagcggttagctccttcggtcctccgatcgttgtcagaagtaagttggccgcagtgttatcactcatggttatggcagcactgcataattctcttactgtcatgccatccgtaagatgcttttctgtgactggtgagtactcaaccaagtcattctgagaatagtgtatgcggcgaccgagttgctcttgcccggcgtcaatacgggataataccgcgccacatagcagaactttaaaagtgctcatcattggaaaacgttcttcggggcgaaaactctcaaggatcttaccgctgttgagatccagttcgatgtaacccactcgtgcacccaactgatcttcagcatcttttactttcaccagcgtttctgggtgagcaaaaacaggaaggcaaaatgccgcaaaaaagggaataagggcgacacggaaatgttgaatactcatactcttcctttttcaatattattgaagcatttatcagggttattgtctcatgagcggatacatatttgaatgtatttagaaaaataaacaaataggggttccgcgcacatttccccgaaaagtgccacctgacgcgccctgtagcggcgcattaagcgcggcgggtgtggtggttacgcgcagcgtgaccgctacacttgccagcgccctagcgcccgctcctttcgctttcttcccttcctttctcgccacgttcgccggctttccccgtcaagctctaaatcgggggctccctttagggttccgatttagtgctttacggcacctcgaccccaaaaaacttgattagggtgatggttcacgtagtgggccatcgccctgatagacggtttttcgccctttgacgttggagtccacgttctttaatagtggactcttgttccaaactggaacaacactcaaccctatctcggtctattcttttgatttataagggattttgccgatttcggcctattggttaaaaaatgagctgatttaacaaaaatttaacgcgaattttaacaaaatattaacgcttacaatttccattcgccattcaggctgcgcaactgttgggaagggcgatcggtgcgggcctcttcgctattacgccagctggcgaaagggggatgtgctgcaaggcgattaagttgggtaacgccagggttttcccagtcacgacgttgtaaaacgacggccagtgaattgtaatacgactcactatagggcgaattgggtaccgggccccccctcgaggtcgatggtgtcgataagcttgatatcgaattcatgtcacacaaaccgatcttcgcctcaaggaaacctaattctacatccgagagactgccgagatccagtctacactgattaattttcgggccaataatttaaaaaaatcgtgttatataatattatatgtattatatatatacatcatgatgatactgacagtcatgtcccattgctaaatagacagactccatctgccgcctccaactgatgttctcaatatttaaggggtcatctcgcattgtttaataataaacagactccatctaccgcctccaaatgatgttctcaaaatatattgtatgaacttatttttattacttagtattattagacaacttacttgctttatgaaaaacacttcctatttaggaaacaatttataatggcagttcgttcatttaacaatttatgtagaataaatgttataaatgcgtatgggaaatcttaaatatggatagcataaatgatatctgcattgcctaattcgaaatcaacagcaacgaaaaaaatcccttgtacaacataaatagtcatcgagaaatatcaactatcaaagaacagctattcacacgttactattgagattattattggacgagaatcacacactcaactgtctttctctcttctagaaatacaggtacaagtatgtactattctcattgttcatacttctagtcatttcatcccacatattccttggatttctctccaatgaatgacattctatcttgcaaattcaacaattataataagatataccaaagtagcggtatagtggcaatcaaaaagcttctctggtgtgcttctcgtatttatttttattctaatgatccattaaaggtatatatttatttcttgttatataatccttttgtttattacatgggctggatacataaaggtattttgatttaattttttgcttaaattcaatcccccctcgttcagtgtcaactgtaatggtaggaaattaccatacttttgaagaagcaaaaaaaatgaaagaaaaaaaaaatcgtatttccaggttagacgttccgcagaatctagaatgcggtatgcggtacattgttcttcgaacgtaaaagttgcgctccctgagatattgtacatttttgcttttacaagtacaagtacatcgtacaactatgtactactgttgatgcatccacaacagtttgttttgtttttttttgttttttttttttctaatgattcattaccgctatgtatacctacttgtacttgtagtaagccgggttattggcgttcaattaatcatagacttatgaatctgcacggtgtgcgctgcgagttacttttagcttatgcatgctacttgggtgtaatattgggatctgttcggaaatcaacggatgctcaaccgatttcgacagtaattaattaatttgaatcgaatcggagcctaaaatgaacccgagtatatctcataaaattctcggtgagaggtctgtgactgtcagtacaaggtgccttcattatgccctcaaccttaccatacctcactgaatgtagtgtacctctaaaaatgaaatacagtgccaaaagccaaggcactgagctcgtctaacggacttgatatacaaccaattaaaacaaatgaaaagaaatacagttctttgtatcatttgtaacaattaccctgtacaaactaaggtattgaaatcccacaatattcccaaagtccacccctttccaaattgtcatgcctacaactcatataccaagcactaacctaccaaacaccactaaaaccccacaaaatatatcttaccgaatatacagtaacaagctaccaccacactcgttgggtgcagtcgccagcttaaagatatctatccacatcagccacaactcccttcctttaataaaccgactacacccttggctattgaggttatgagtgaatatactgtagacaagacactttcaagaagactgtttccaaaacgtaccactgtcctccactacaaacacacccaatctgcttcttctagtcaaggttgctacaccggtaaattataaatcatcatttcattagcagggcagggccctttttatagagtcttatacactagcggaccctgccggtagaccaacccgcaggcgcgtcagtttgctccttccatcaatgcgtcgtagaaacgacttactccttcttgagcagctccttgaccttgttggcaacaagtctccgacctcggaggtggaggaagagcctccgatatcggcggtagtgataccagcctcgacggactccttgacggcagcctcaacagcgtcaccggcgggcttcatgttaagagagaacttgagcatcatggcggcagacagaatggtggcaatggggttgaccttctgcttgccgagatcgggggcagatccgtgacagggctcgtacagaccgaacgcctcgttggtgtcgggcagagaagccagagaggcggagggcagcagacccagagaaccggggatgacggaggcctcgtcggagatgatatcgccaaacatgttggtggtgatgatgataccattcatcttggagggctgcttgatgaggatcatggcggccgagtcgatcagctggtggttgagctcgagctgggggaattcgtccttgaggactcgagtgacagtctttcgccaaagtcgagaggaggccagcacgttggccttgtcaagagaccacacgggaagaggggggttgtgctgaagggccaggaaggcggccattcgggcaattcgctcaacctcaggaacggagtaggtctcggtgtcggaagcgacgccagatccgtcatcctcctttcgctctccaaagtagatacctccgacgagctctcggacaatgatgaagtcggtgccctcaacgtttcggatgggggagagatcggcgagcttgggcgacagcagctggcagggtcgcaggttggcgtacaggttcaggtcctttcgcagcttgaggagaccctgctcgggtcgcacgtcggttcgtccgtcgggagtggtccatacggtgttggcagcgcctccgacagcaccgagcataatagagtcagcctttcggcagatgtcgagagtagcgtcggtgatgggctcgccctccttctcaatggcagctcctccaatgagtcggtcctcaaacacaaactcggtgccggaggcctcagcaacagacttgagcaccttgacggcctcggcaatcacctcggggccacagaagtcgccgccgagaagaacaatcttcttggagtcagtcttggtcttcttagtttcgggttccattgtggatgtgtgtggttgtatgtgtgatgtggtgtgtggagtgaaaatctgtggctggcaaacgctcttgtatatatacgcacttttgcccgtgctatgtggaagactaaacctccgaagattgtgactcaggtagtgcggtatcggctagggacccaaaccttgtcgatgccgatagcgctatcgaacgtaccccagccggccgggagtatgtcggaggggacatacgagatcgtcaagggtttgtggccaactggtatttaaatgtagctaacggtagcaggcgaactactggtacatacctcccccggaatatgtacaggcataatgcgtatctgtgggacatgtggtcgttgcgccattatgtaagcagcgtgtactcctctgactgtccatatggtttgctccatctcaccctcatcgttttcattgttcacaggcggccacaaaaaaactgtcttctctccttctctcttcgccttagtctactcggaccagttttagtttagcttggcgccactggataaatgagacctcaggccttgtgatgaggaggtcacttatgaagcatgttaggaggtgcttgtatggatagagaagcacccaaaataataagaataataataaaacagggggcgttgtcatttcatatcgtgttttcaccatcaatacacctccaaacaatgcccttcatgtggccagccccaatattgtcctgtagttcaactctatgcagctcgtatcttattgagcaagtaaaactctgtcagccgatattgcccgacccgcgacaagggtcaacaaggtggtgtaaggccttcgcagaagtcaaaactgtgccaaacaaacatctagagtctctttggtgtttctcgcatatatttwatcggctgtcttacgtatttgcgcctcggtaccggactaatttcggatcatccccaatacgctttttcttcgcagctgtcaacagtgtccatgatctatccacctaaatgggtcatatgaggcgtataatttcgtggtgctgataataattcccatatatttgacacaaaacttccccccctagacatacatctcacaatctcacttcttgtgcttctgtcacacatctcctccagctgacttcaactcacacctctgccccagttggtctacagcggtataaggtttctccgcatagaggtgcaccactcctcccgatacttgtttgtgtgacttgtgggtcacgacatatatatctacacacattgcgccaccctttggttcttccagcacaacaaaaacacgacacgctaaccatggccaatttactgaccgtacaccaaaatttgcctgcattaccggtcgatgcaacgagtgatgaggttcgcaagaacctgatggacatgttcagggatcgccaggcgttttctgagcatacctggaaaatgcttctgtccgtttgccggtcgtgggcggcatggtgcaagttgaataaccggaaatggtttcccgcagaacctgaagatgttcgcgattatcttctatatcttcaggcgcgcggtctggcagtaaaaactatccagcaacatttgggccagctaaacatgcttcatcgtcggtccgggctgccacgaccaagtgacagcaatgctgtttcactggttatgcggcggatccgaaaagaaaacgttgatgccggtgaacgtgcaaaacaggctctagcgttcgaacgcactgatttcgaccaggttcgttcactcatggaaaatagcgatcgctgccaggatatacgtaatctggcatttctggggattgcttataacaccctgttacgtatagccgaaattgccaggatcagggttaaagatatctcacgtactgacggtgggagaatgttaatccatattggcagaacgaaaacgctggttagcaccgcaggtgtagagaaggcacttagcctgggggtaactaaactggtcgagcgatggatttccgtctctggtgtagctgatgatccgaataactacctgttttgccgggtcagaaaaaatggtgttgccgcgccatctgccaccagccagctatcaactcgcgccctggaagggatttttgaagcaactcatcgattgatttacggcgctaaggatgactctggtcagagatacctggcctggtctggacacagtgcccgtgtcggagccgcgcgagatatggcccgcgctggagtttcaataccggagatcatgcaagctggtggctggaccaatgtaaatattgtcatgaactatatccgtaacctggatagtgaaacaggggcaatggtgcgcctgctggaagatggcgattaagc

SEQ ID NO: 52 - DNA, 15337 bp, Artificial Sequence
  Plasmid pKO2UF8289
cgatcgaggaagaggacaagcggctgcttcttaagtttgtgacatcagtatccaaggcaccattgcaaggattcaaggctttgaacccgtcatttgccattcgtaacgctggtagacaggttgatcggttccctacggcctccacctgtgtcaatcttctcaagctgcctgactatcaggacattgatcaacttcggaagaaacttttgtatgccattcgatcacatgctggtttcgatttgtcttagaggaacgcatatacagtaatcatagagaataaacgatattcatttattaaagtagatagttgaggtagaagttgtaaagagtgataaatagcggccgctcactgaatctttttggctcccttgtgcttcctgacgatatacgtttgcacatagaaattcaagaacaaacacaagactgtgccaacataaaagtaattgaagaaccagccaaacatcctcatcccatcttggcgataacagggaatgttcctgtacttccagacaatgtagaaaccaacattgaattgaatgatctgcattgatgtaatcagggattttggcatggggaacttcagcttgatcaatctggtccaataataaccgtacatgatccagtggatgaaaccattcaacagcacaaaaatccaaacagcttcatttcggtaattatagaacagccacatatccatcggtgcccccaaatgatggaagaattgcaaccaggtcagaggcttgcccatcagtggcaaatagaaggagtcaatatactccaggaacttgctcaaatagaacaactgcgtggtgatcctgaagacgttgttgtcaaaagccttctcgcagttgtcagacataacaccgatggtgtacatggcatatgccattgagaggaatgatcccaacgaataaatggacatgagaaggttgtaattggtgaaaacaaacttcatacgagactgaccttttggaccaagggggccaagagtgaacttcaagatgacaaatgcgatggacaagtaaagcacctcacagtgactggcatcactccagagttgggcataatcaactggttgggtaaaacttcctgcccaattgagactatttcattcaccacctccatggttagcgtgtcgtgtttttgttgtgctggaagaaccaaagggtggcgcaatgtgtgtagatatatatgtcgtgacccacaagtcacacaaacaagtatcgggaggagtggtgcacctctatgcggagaaaccttataccgctgtagaccaactggggcagaggtgtgagttgaagtcagctggaggagatgtgtgacagaagcacaagaagtgagattgtgagatgtatgtctagggggggaagttttgtgtcaaatatatgggaattattatcagcaccacgaaattatacgcctcatatgacccatttaggtggatagatcatggacactgttgacagctgcgaagaaaaagcgtattggggatgatccgaaattagtccggtaccgaggcgcaaatacgtaagacagccgatwaaatatatgcgagaaacaccaaagagactctagatgtttgtttggcacagttttgacttctgcgaaggccttacaccaccttgttgacccttgtcgcgggtcgggcaatatcggctgacagagttttacttgctcaataagatacgagctgcatagagttgaactacaggacaatattggggctggccacatgaagggcattgtttggaggtgtattgatggtgaaaacacgatatgaaatgacaacgccccctgttttattattattcttattattttgggtgcttctctatccatacaagcacctcctaacatgcttcataagtgacctcctcatcacaaggcctgaggtctcatttatccagtggcgccaagctaaactaaaactggtccgagtagactaaggcgaagagagaaggagagaagacagtttttttgtggccgcctgtgaacaatgaaaacgatgagggtgagatggagcaaaccatatggtttaaacagtcagaggagtacacgctgcttacataatggcgcaacgaccacatgtcccacagatacgcatcgattcgattcaaattaattaaaaggcgttgaaacagaatgagccagacagcaaggacaaggtggccaacagcaaggagtccaaaaagccctctattgacgagatccacgatgttattgctcatgaggtttccgagctcgatgctgggaagaagaagtgatttgtatataagaaataaatgagatatagtaaaggagtgcaagagaatggcaaggtggtcaaattctatattacttgcagtcactggttcctcgttgacatgaatgaagttaccgttggcatagctgatttaatatataactgtccaactaactctcacctagatataacccatgtgtgtgtttccaatcatcaatgcggccgcttactgagccttggcaccgggctgcttctcggccattcgagcgaactgggacaggtatcggagcaggatgacgagaccttcatggggcagagggtttcggtaggggaggttgtgcttctggcacagctgttccacctggtaggaaacggcagtgaggttgtgtcgaggcagggtgggccagagatggtgctcgatctggtagttcaggcctccaaagaaccagtcagtaatgatgcctcgtcgaatgttcatggtctcatggatctgacccacagagaagccatgtccgtcccagacggaatcaccgatcttctccagagggtagtggttcatgaagaccacgatggcaattccgaagccaccgacgagctcggaaacaaagaacaccagcatcgaggtcaggatggagggcataaagaagaggtggaacagggtcttgagagtccagtgcagagcgagtccaatggcctctttcttgtactgagatcggtagaactggttgtctcggtccttgagggatcgaacggtcagcacagactggaaacaccagatgaatcgcaggagaatacagatgaccaggaaatagtactgttggaactgaatgagctttcgggagatgggagaagctcgagtgacatcgtcctcggaccaggcgagcagaggcaggttatcaatgtcgggatcgtgaccctgaacgttggtagcagaatgatgggcgttgtgtctgtccttccaccaggtcacggagaagccctggagtccgttgccaaagaccagacccaggacgttattccagtttcggttcttgaaggtctggtggtggcagatgtcatgagacagccatcccatttgctggtagtgcataccgagcacgagagcaccaatgaagtacaggtggtactggaccagcatgaagaaggcaagcacgccaagacccagggtggtcaagatcttgtacgagtaccagaggggagaggcgtcaaacatgccagtggcgatcagctcttctcggagctttcggaaatcctcctgagcttcgttgacggcagcctggggaggcagctcggaagcctggttgatcttgggcattcgcttgagcttgtcgaaggcttcctgagagtgcataaccatgaaggcgtcagtagcatctcgtccctggtagttctcaatgatttcagctccaccagggtggaagttcacccaagcggagacgtcgtacacctttccgtcgatgacgaggggcagagcctgtcgagaagccttcaccatggccattgctgtagatatgtcttgtgtgtaagggggttggggtggttgtttgtgttcttgacttttgtgttagcaagggaagacgggcaaaaaagtgagtgtggttgggagggagagacgagccttatatataatgcttgtttgtgtttgtgcaagtggacgccgaaacgggcaggagccaaactaaacaaggcagacaatgcgagcttaattggattgcctgatgggcaggggttagggctcgatcaatgggggtgcgaagtgacaaaattgggaattaggttcgcaagcaaggctgacaagactttggcccaaacatttgtacgcggtggacaacaggagccacccatcgtctgtcacgggctagccggtcgtgcgtcctgtcaggctccacctaggctccatgccactccatacaatcccactagtgtaccgctaggccgcttttagctcccatctaagacccccccaaaacctccactgtacagtgcactgtactgtgtggcgatcaagggcaagggaaaaaaggcgcaaacatgcacgcatggaatgacgtaggtaaggcgttactagactgaaaagtggcacatttcggcgtgccaaagggtcctaggtgcgtttcgcgagctgggcgccaggccaagccgctccaaaacgcctctccgactccctccagcggcctccatatccccatccctctccacagcaatgttgttaagccttgcaaacgaaaaaatagaaaggctaataagcttccaatattgtggtgtacgctgcataacgcaacaatgagcgccaaacaacacacacacacagcacacagcagcattaaccacgatgtttaaacagtgtacgcagatcccgtcaacagttttatatatcgtagttacaaccatcaacactttttggtaagtgtaccattctatactccaactggtctgcaactgtacaagtagacatgttaatggtagttaataacatctacagcagaacctatggtaaagacattgcatttttacaggaagtatcgtcctacacgttgataaatccaaagatgcggaacttcttccacttttatcatcatcccctactcgtacactcgtactctttgttcgatcgcgattcatttctataaataatcttgtatgtacatgcggccgcttaagcaacgggcttgataacagcggggggggtgcccacgttgttgcggttgcggaagaacagaacacccttaccagcaccctcggcaccagcgctgggctcaacccactggcacatacgcgcactgcggtacatggcgcggatgaagccacgaggaccatcctggacatcagcccggtagtgcttgcccatgatgggcttaatggcctcggtggcctcgtccgcgttgtagaaggggatgctgctgacgtagtggtggaggacatgagtctcgatgatgccgtggagaaggtggcggccgatgaagcccatctcacggtcaatggtagcagcggcaccacggacgaagttccactcgtcgttggtgtagtggggaagggtagggtcggtgtgctggaggaaggtgatggcaacgagccagtggttaacccagaggtagggaacaaagtaccagatggccatgttgtagaaaccgaacttctgaacgaggaagtacagagcagtggccatcagaccgataccaatatcgctgaggacgatgagcttagcgtcactgttctcgtacagagggctgcggggatcgaagtggttaacaccaccgccgaggccgttatgcttgcccttgccgcgaccctcacgctggcgctcgtggtagttgtggccggtaacattggtgatgaggtagttgggccagccaacgagctgctgaaggacgagcatgagaagagtgaaagcgggggtctcctcagtaagatgagcgagctcgtgggtcatctttccgagacgagtagcctgctgctcgcgggttcggggaacgaagaccatgtcacgctccatgttgccagtggccttgtggtgctttcggtgggagatttgccagctgaagtaggggacaaggagggaagagtgaagaacccagccagtaatgtcgttgatgatgcgagaatcggagaaagcaccgtgaccgcactcatgggcaataacccagagaccagtaccgaaaagaccctgaagaacggtgtacacggcccacagaccagcgcgggcgggggtggaggggatatattcgggggtcacaaagttgtaccagatgctgaaagtggtagtcaggaggacaatgtcgcggaggatataaccgtatcccttgagagcggagcgcttgaagcagtgcttagggatggcattgtagatgtccttgatggtaaagtcgggaacctcgaactggttgccgtaggtgtcgagcatgacaccatactcggacttgggcttggcgatatcaacctcggacatggacgagagcgatgtggaagaggccgagtggcggggagagtctgaaggagagacggcggcagactcagaatccgtcacagtagttgaggtgacggtgcgtctaagcgcagggttctgcttgggcagagccgaagtggacgccatggttgtgaattagggtggtgagaatggttggttgtagggaagaatcaaaggccggtctcgggatccgtgggtatatatatatatatatatatatacgatccttcgttacctccctgttctcaaaactgtggtttttcgtttttcgttttttgctttttttgatttttttagggccaactaagcttccagatttcgctaatcacctttgtactaattacaagaaaggaagaagctgattagagttgggctttttatgcaactgtgctactccttatctctgatatgaaagtgtagacccaatcacatcatgtcatttagagttggtaatactgggaggatagataaggcacgaaaacgagccatagcagacatgctgggtgtagccaagcagaagaaagtagatgggagccaattgacgagcgagggagctacgccaatccgacatacgacacgctgagatcgtcttggccggggggtacctacagatgtccaagggtaagtgcttgactgtaattgtatgtctgaggacaaatatgtagtcagccgtataaagtcataccaggcaccagtgccatcatcgaaccactaactctctatgatacatgcctccggtattattgtaccatgcgtcgctttgttacatacgtatcttgcctttttctctcagaaactccagactttggctattggtcgagataagcccggaccatagtgagtctttcacactctacatttctcccttgctccaactatttaaattgccccggagaagacggccaggccgcctagatgacaaattcaacaactcacagctgactttctgccattgccactaggggggggcctttttatatggccaagccaagctctccacgtcggttgggctgcacccaacaataaatgggtagggttgcaccaacaaagggatgggatggggggtagaagatacgaggataacggggctcaatggcacaaataagaacgaatactgccattaagactcgtgatccagcgactgacaccattgcatcatctaagggcctcaaaactacctcggaactgctgcgctgatctggacaccacagaggttccgagcactttaggttgcaccaaatgtcccaccaggtgcaggcagaaaacgctggaacagcgtgtacagtttgtcttaacaaaaagtgagggcgctgaggtcgagcagggtggtgtgacttgttatagcctttagagctgcgaaagcgcgtatggatttggctcatcaggccagattgagggtctgtggacacatgtcatgttagtgtacttcaatcgccccctggatatagccccgacaataggccgtggcctcatttttttgccttccgcacatttccattgctcggtacccacaccttgcttctcctgcacttgccaaccttaatactggtttacattgaccaacatcttacaagcggggggcttgtctagggtatatataaacagtggctctcccaatcggttgccagtctcttttttcctttctttccccacagattcgaaatctaaactacacatcacagaattccgagccgtgagtatccacgacaagatcagtgtcgagacgacgcgttttgtgtaatgacacaatccgaaagtcgctagcaacacacactctctacacaaactaacccagctctggtaccatggtgaaggcttctcgacaggctctgcccctcgtcatcgacggaaaggtgtacgacgtctccgcttgggtgaacttccaccctggtggagctgaaatcattgagaactaccagggacgagatgctactgacgccttcatggttatgcactctcaggaagccttcgacaagctcaagcgaatgcccaagatcaaccaggcttccgagctgcctccccaggctgccgtcaacgaagctcaggaggatttccgaaagctccgagaagagctgatcgccactggcatgtttgacgcctctcccctctggtactcgtacaagatcttgaccaccctgggtcttggcgtgcttgccttcttcatgctggtccagtaccacctgtacttcattggtgctctcgtgctcggtatgcactaccagcaaatgggatggctgtctcatgacatctgccaccaccagaccttcaagaaccgaaactggaataacgtcctgggtctggtctttggcaacggactccagggcttctccgtgacctggtggaaggacagacacaacgcccatcattctgctaccaacgttcagggtcacgatcccgacattgataacctgcctctgctcgcctggtccgaggacgatgtcactcgagcttctcccatctcccgaaagctcattcagttccaacagtactatttcctggtcatctgtattctcctgcgattcatctggtgtttccagtctgtgctgaccgttcgatccctcaaggaccgagacaaccagttctaccgatctcagtacaagaaagaggccattggactcgctctgcactggactctcaagaccctgttccacctcttctttatgccctccatcctgacctcgatgctggtgttctttgtttccgagctcgtcggtggcttcggaattgccatcgtggtcttcatgaaccactaccctctggagaagatcggtgattccgtctgggacggacatggcttctctgtgggtcagatccatgagaccatgaacattcgacgaggcatcattactgactggttctttggaggcctgaactaccagatcgagcaccatctctggcccaccctgcctcgacacaacctcactgccgtttcctaccaggtggaacagctgtgccagaagcacaacctcccctaccgaaaccctctgccccatgaaggtctcgtcatcctgctccgatacctgtcccagttcgctcgaatggccgagaagcagcccggtgccaaggctcagtaagcggccgcaagtgtggatggggaagtgagtgcccggttctgtgtgcacaattggcaatccaagatggatggattcaacacagggatatagcgagctacgtggtggtgcgaggatatagcaacggatatttatgtttgacacttgagaatgtacgatacaagcactgtccaagtacaatactaaacatactgtacatactcatactcgtacccgggcaacggtttcacttgagtgcagtggctagtgctcttactcgtacagtgtgcaatactgcgtatcatagtctttgatgtatatcgtattcattcatgttagttgcgtacgggtgaagcttccactggtcggcgtggtagtggggcagagtggggtcggtgtgctgcaggtaggtgatggccacgagccagtggttgacccacaggtaggggatcaggtagtagagggtgacggaagccaggccccatcggttgatggagtatgcgatgacggacatggtgataccaataccgacgttagagatccagatgttgaaccagtccttcttctcaaacagcggggcgttggggttgaagtggttgacagcccatttgttgagcttggggtacttctgtccggtaacgtaagacagcagatacagaggccatccaaacacctgctgggtgatgaggccgtagagggtcatgaggggagcgtcctcagcaagctcagaccagtcatgggcgcctcggttctccataaactcctttcggtccttgggcacaaacaccatatcacgggtgaggtgaccagtggacttgtggtgcatggagtgggtcagcttccaggcgtagtaagggaccagcatggaggagtgcagaacccatccggtgacgttgttgacggtgttagagtcggagaaagcagagtggccacactcgtgggcaagaacccacagaccggtgccaaacagaccctggacaatggagtacatggcccaggccacagctcggccggaagccgagggaataagaggcaggtacgcgtaggccatgtaggcaaaaacggcgataaagaagcaggcgcgccagctgcattaatgaatcggccaacgcgcggggagaggcggtttgcgtattgggcgctcttccgcttcctcgctcactgactcgctgcgctcggtcgttcggctgcggcgagcggtatcagctcactcaaaggcggtaatacggttatccacagaatcaggggataacgcaggaaagaacatgtgagcaaaaggccagcaaaaggccaggaaccgtaaaaaggccgcgttgctggcgtttttccataggctccgcccccctgacgagcatcacaaaaatcgacgctcaagtcagaggtggcgaaacccgacaggactataaagataccaggcgtttccccctggaagctccctcgtgcgctctcctgttccgaccctgccgcttaccggatacctgtccgcctttctcccttcgggaagcgtggcgctttctcatagctcacgctgtaggtatctcagttcggtgtaggtcgttcgctccaagctgggctgtgtgcacgaaccccccgttcagcccgaccgctgcgccttatccggtaactatcgtcttgagtccaacccggtaagacacgacttatcgccactggcagcagccactggtaacaggattagcagagcgaggtatgtaggcggtgctacagagttcttgaagtggtggcctaactacggctacactagaagaacagtatttggtatctgcgctctgctgaagccagttaccttcggaaaaagagttggtagctcttgatccggcaaacaaaccaccgctggtagcggtggtttttttgtttgcaagcagcagattacgcgcagaaaaaaaggatctcaagaagatcctttgatcttttctacggggtctgacgctcagtggaacgaaaactcacgttaagggattttggtcatgagattatcaaaaaggatcttcacctagatccttttaaattaaaaatgaagttttaaatcaatctaaagtatatatgagtaaacttggtctgacagttaccaatgcttaatcagtgaggcacctatctcagcgatctgtctatttcgttcatccatagttgcctgactccccgtcgtgtagataactacgatacgggagggcttaccatctggccccagtgctgcaatgataccgcgagacccacgctcaccggctccagatttatcagcaataaaccagccagccggaagggccgagcgcagaagtggtcctgcaactttatccgcctccatccagtctattaattgttgccgggaagctagagtaagtagttcgccagttaatagtttgcgcaacgttgttgccattgctacaggcatcgtggtgtcacgctcgtcgtttggtatggcttcattcagctccggttcccaacgatcaaggcgagttacatgatcccccatgttgtgcaaaaaagcggttagctccttcggtcctccgatcgttgtcagaagtaagttggccgcagtgttatcactcatggttatggcagcactgcataattctcttactgtcatgccatccgtaagatgcttttctgtgactggtgagtactcaaccaagtcattctgagaatagtgtatgcggcgaccgagttgctcttgcccggcgtcaatacgggataataccgcgccacatagcagaactttaaaagtgctcatcattggaaaacgttcttcggggcgaaaactctcaaggatcttaccgctgttgagatccagttcgatgtaacccactcgtgcacccaactgatcttcagcatcttttactttcaccagcgtttctgggtgagcaaaaacaggaaggcaaaatgccgcaaaaaagggaataagggcgacacggaaatgttgaatactcatactcttcctttttcaatattattgaagcatttatcagggttattgtctcatgagcggatacatatttgaatgtatttagaaaaataaacaaataggggttccgcgcacatttccccgaaaagtgccacctgatgcggtgtgaaataccgcacagatgcgtaaggagaaaataccgcatcaggaaattgtaagcgttaatattttgttaaaattcgcgttaaatttttgttaaatcagctcattttttaaccaataggccgaaatcggcaaaatcccttataaatcaaaagaatagaccgagatagggttgagtgttgttccagtttggaacaagagtccactattaaagaacgtggactccaacgtcaaagggcgaaaaaccgtctatcagggcgatggcccactacgtgaaccatcaccctaatcaagttttttggggtcgaggtgccgtaaagcactaaatcggaaccctaaagggagcccccgatttagagcttgacggggaaagccggcgaacgtggcgagaaaggaagggaagaaagcgaaaggagcgggcgctagggcgctggcaagtgtagcggtcacgctgcgcgtaaccaccacacccgccgcgcttaatgcgccgctacagggcgcgtccattcgccattcaggctgcgcaactgttgggaagggcgatcggtgcgggcctcttcgctattacgccagctggcgaaagggggatgtgctgcaaggcgattaagttgggtaacgccagggttttcccagtcacgacgttgtaaaacgacggccagtgaattgtaatacgactcactatagggcgaattgggcccgacgtcgcatgcttgaatctacaagtaggagggttggagtgattaagtgaaacttctttaacggctctatgccagttctattgatatccgaaacatcagtatgaaggtctgataagggtgacttcttcccacagattcgtatcagtacgagtacgagaccggtacttgtaacagtattgatactaaagggaaactacaacggttgtcagcgtaatgtgacttcgcccatgaacgcagacacgcagtgccgagtgcggtgatatcgcctactcgttacgtccatggactacacaacccctcggcttcgcttggcttagcctcgggctcggtgctgttcagttaaaacacaatcaaataacatttctactttttagaaggcaggccgtcaggagcaactccgactccattgacgtttctaaacatctgaatgccttccttaccttcaacaaactggcaggttcgggcgacagtgtaaagagacttgatgaagttggtgtcgtcgtgtcggtagtgcttgcccatgaccttcttgatcttctcagtggcgattcgggcgttgtagaagggaattcctttacctgcaggataacttcgtataatgtatgctatacgaagttatgatctctctcttgagcttttccataacaagttcttctgcctccaggaagtccatgggtggtttgatcatggttttggtgtagtggtagtgcagtggtggtattgtgactggggatgtagttgagaataagtcatacacaagtcagctttcttcgagcctcatataagtataagtagttcaacgtattagcactgtacccagcatctccgtatcgagaaacacaacaacatgccccattggacagatcatgcggatacacaggttgtgcagtatcatacatactcgatcagacaggtcgtctgaccatcatacaagctgaacaagcgctccatacttgcacgctctctatatacacagttaaattacatatccatagtctaacctctaacagttaatcttctggtaagcctcccagccagccttctggtatcgcttggcctcctcaataggatctcggttctggccgtacagacctcggccgacaattatgatatccgttccggtagacatgacatcctcaacagttcggtactgctgtccgagagcgtctcccttgtcgtcaagacccaccccgggggtcagaataagccagtcctcagagtcgcccttaggtcggttctgggcaatgaagccaaccacaaactcggggtcggatcgggcaagctcaatggtctgcttggagtactcgccagtggccagagagcccttgcaagacagctcggccagcatgagcagacctctggccagcttctcgttgggagaggggactaggaactccttgtactgggagttctcgtagtcagagacgtcctccttcttctgttcagagacagtttcctcggcaccagctcgcaggccagcaatgattccggttccgggtacaccgtgggcgttggtgatatcggaccactcggcgattcggtgacaccggtactggtgcttgacagtgttgccaatatctgcgaactttctgtcctcgaacaggaagaaaccgtgcttaagagcaagttccttgagggggagcacagtgccggcgtaggtgaagtcgtcaatgatgtcgatatgggttttgatcatgcacacataaggtccgaccttatcggcaagctcaatgagctccttggtggtggtaacatccagagaagcacacaggttggttttcttggctgccacgagcttgagcactcgagcggcaaaggcggacttgtggacgttagctcgagcttcgtaggagggcattttggtggtgaagaggagactgaaataaatttagtctgcagaactttttatcggaaccttatctggggcagtgaagtatatgttatggtaatagttacgagttagttgaacttatagatagactggactatacggctatcggtccaaattagaaagaacgtcaatggctctctgggcgtcgcctttgccgacaaaaatgtgatcatgatgaaagccagcaatgacgttgcagctgatattgttgtcggccaaccgcgccgaaaacgcagctgtcagacccacagcctccaacgaagaatgtatcgtcaaagtgatccaagcacactcatagttggagtcgtactccaaaggcggcaatgacgagtcagacagatactcgtcgacgcgataacttcgtataatgtatgctatacgaagttatcgtacgatagttagtagacaacaat

SEQ ID NO: 53 - DNA, 1272 bp, Artificial Sequence
  mutant EgD8S-23 delta-8 desaturase
  CDS (2)..(1270)
catggtgaaggcttctcgacaggctctgcccctcgtcatcgacggaaaggtgtacgacgtctccgcttgggtgaacttccaccctggtggagctgaaatcattgagaactaccagggacgagatgctactgacgccttcatggttatgcactctcaggaagccttcgacaagctcaagcgaatgcccaagatcaaccaggcttccgagctgcctccccaggctgccgtcaacgaagctcaggaggatttccgaaagctccgagaagagctgatcgccactggcatgtttgacgcctctcccctctggtactcgtacaagatcttgaccaccctgggtcttggcgtgcttgccttcttcatgctggtccagtaccacctgtacttcattggtgctctcgtgctcggtatgcactaccagcaaatgggatggctgtctcatgacatctgccaccaccagaccttcaagaaccgaaactggaataacgtcctgggtctggtctttggcaacggactccagggcttctccgtgacctggtggaaggacagacacaacgcccatcattctgctaccaacgttcagggtcacgatcccgacattgataacctgcctctgctcgcctggtccgaggacgatgtcactcgagcttctcccatctcccgaaagctcattcagttccaacagtactatttcctggtcatctgtattctcctgcgattcatctggtgtttccagtctgtgctgaccgttcgatccctcaaggaccgagacaaccagttctaccgatctcagtacaagaaagaggccattggactcgctctgcactggactctcaagaccctgttccacctcttctttatgccctccatcctgacctcgatgctggtgttctttgtttccgagctcgtcggtggcttcggaattgccatcgtggtcttcatgaaccactaccctctggagaagatcggtgattccgtctgggacggacatggcttctctgtgggtcagatccatgagaccatgaacattcgacgaggcatcattactgactggttctttggaggcctgaactaccagatcgagcaccatctctggcccaccctgcctcgacacaacctcactgccgtttcctaccaggtggaacagctgtgccagaagcacaacctcccctaccgaaaccctctgccccatgaaggtctcgtcatcctgctccgatacctgtcccagttcgctcgaatggccgagaagcagcccggtgccaaggctcagtaagc

SEQ ID NO: 54 - protein, 422 aa, Artificial Sequence
  Synthetic Construct
MVKASRQALPLVIDGKVYDVSAWVNFHPGGAEIIENYQGRDATDAFMVMHSQEAFDKLKRMPKINQASELPPQAAVNEAQEDFRKLREELIATGMFDASPLWYSYKILTTLGLGVLAFFMLVQYHLYFIGALVLGMHYQQMGWLSHDICHHQTFKNRNWNNVLGLVFGNGLQGFSVTWWKDRHNAHHSATNVQGHDPDIDNLPLLAWSEDDVTRASPISRKLIQFQQYYFLVICILLRFIWCFQSVLTVRSLKDRDNQFYRSQYKKEAIGLALHWTLKTLFHLFFMPSILTSMLVFFVSELVGGFGIAIVVFMNHYPLEKIGDSVWDGHGFSVGQIHETMNIRRGIITDWFFGGLNYQIEHHLWPTLPRHNLTAVSYQVEQLCQKHNLPYRNPLPHEGLVILLRYLSQFARMAEKQPGAKAQ

SEQ ID NO: 55 - DNA, 1272 bp, Euglena gracilis
  CDS (2)..(1270): synthetic delta-8 desaturase (codon-optimized for Yarrowia lipolytica) ("D8SF" or "EgD8S")
  ref <302>: TITLE: DELTA-8 DESATURASE AND ITS USE IN MAKING POLYUNSATURATED FATTY ACIDS
  ref <310>: PATENT DOCUMENT NUMBER: WO 2006/012325 and WO 2006/012326
  ref <311>: PATENT FILING DATE: 2005-06-24
  ref <312>: PUBLICATION DATE: 2006-02-02
  ref <313>: RELEVANT RESIDUES IN SEQ ID NO: (1)..(1272)
  ref <302>: TITLE: DELTA-8 DESATURASE AND ITS USE IN MAKING POLYUNSATURATED FATTY ACIDS
  ref <310>: PATENT DOCUMENT NUMBER: US-2005-0287652-A1
  ref <311>: PATENT FILING DATE: 2005-06-24
  ref <312>: PUBLICATION DATE: 2005-12-29
  ref <313>: RELEVANT RESIDUES IN SEQ ID NO: (1)..(1272)
catggtgaagtccaagcgacaggctctgcccctcaccatcgacggaactacctacgacgtctccgcttgggtgaacttccaccctggtggagctgaaatcattgagaactaccagggacgagatgctactgacgccttcatggttatgcactctcaggaagccttcgacaagctcaagcgaatgcccaagatcaacccctcctccgagctgcctccccaggctgccgtcaacgaagctcaggaggatttccgaaagctccgagaagagctgatcgccactggcatgtttgacgcctctcccctctggtactcgtacaagatctccaccaccctgggtcttggcgtgcttggatacttcctgatggtccagtaccagatgtacttcattggtgctgtgctgctcggtatgcactaccagcaaatgggatggctgtctcatgacatctgccaccaccagaccttcaagaaccgaaactggaataacctcgtgggtctggtctttggcaacggactccagggcttctccgtgacctggtggaaggacagacacaacgcccatcattctgctaccaacgttcagggtcacgatcccgacattgataacctgcctctgctcgcctggtccgaggacgatgtcactcgagcttctcccatctcccgaaagctcattcagttccaacagtactatttcctggtcatctgtattctcctgcgattcatctggtgtttccagtctgtgctgaccgttcgatccctcaaggaccgagacaaccagttctaccgatctcagtacaagaaagaggccattggactcgctctgcactggactctcaagaccctgttccacctcttctttatgccctccatcctgacctcgctcctggtgttctttgtttccgagctcgtcggtggcttcggaattgccatcgtggtcttcatgaaccactaccctctggagaagatcggtgattccgtctgggacggacatggcttctctgtgggtcagatccatgagaccatgaacattcgacgaggcatcattactgactggttctttggaggcctgaactaccagatcgagcaccatctctggcccaccctgcctcgacacaacctcactgccgtttcctaccaggtggaacagctgtgccagaagcacaacctcccctaccgaaaccctctgccccatgaaggtctcgtcatcctgctccgatacctggccgtgttcgctcgaatggccgagaagcagcccgctggcaaggctctctaagc

SEQ ID NO: 56 - protein, 422 aa, Euglena gracilis
MVKSKRQALPLTIDGTTYDVSAWVNFHPGGAEIIENYQGRDATDAFMVMHSQEAFDKLKRMPKINPSSELPPQAAVNEAQEDFRKLREELIATGMFDASPLWYSYKISTTLGLGVLGYFLMVQYQMYFIGAVLLGMHYQQMGWLSHDICHHQTFKNRNWNNLVGLVFGNGLQGFSVTWWKDRHNAHHSATNVQGHDPDIDNLPLLAWSEDDVTRASPISRKLIQFQQYYFLVICILLRFIWCFQSVLTVRSLKDRDNQFYRSQYKKEAIGLALHWTLKTLFHLFFMPSILTSLLVFFVSELVGGFGIAIVVFMNHYPLEKIGDSVWDGHGFSVGQIHETMNIRRGIITDWFFGGLNYQIEHHLWPTLPRHNLTAVSYQVEQLCQKHNLPYRNPLPHEGLVILLRYLAVFARMAEKQPAGKAL

SEQ ID NO: 57 - DNA, 13707 bp, Artificial Sequence
  Plasmid pZKSL-555R
aaacagtgtacgcagatctgcccatgatgggggctcccaccaccagcaatcagggccctgattacacacccacctgtaatgtcatgctgttcatcgtggttaatgctgctgtgtgctgtgtgtgtgtgttgtttggcgctcattgttgcgttatgcagcgtacaccacaatattggaagcttattagcctttctattttttcgtttgcaaggcttaacaacattgctgtggagagggatggggatatggaggccgctggagggagtcggagaggcgttttggagcggcttggcctggcgcccagctcgcgaaacgcacctaggaccctttggcacgccgaaatgtgccacttttcagtctagtaacgccttacctacgtcattccatgcgtgcatgtttgcgccttttttcccttgcccttgatcgccacacagtacagtgcactgtacagtggaggttttgggggggtcttagatgggagctaaaagcggcctagcggtacactagtgggattgtatggagtggcatggagcctaggtggagcctgacaggacgcacgaccggctagcccgtgacagacgatgggtggctcctgttgtccaccgcgtacaaatgtttgggccaaagtcttgtcagccttgcttgcgaacctaattcccaattttgtcacttcgcacccccattgatcgagccctaacccctgcccatcaggcaatccaattaagctcgcattgtctgccttgtttagtttggctcctgcccgtttcggcgtccacttgcacaaacacaaacaagcattatatataaggctcgtctctccctcccaaccacactcacttttttgcccgtcttcccttgctaacacaaaagtcaagaacacaaacaaccaccccaacccccttacacacaagacatatctacagcaatggccatggctctctcccttactaccgagcagctgctcgagcgacccgacctggttgccatcgacggcattctctacgatctggaaggtcttgccaaggtccatcccggaggcgacttgatcctcgcttctggtgcctccgatgcttctcctctgttctactccatgcacccttacgtcaagcccgagaactcgaagctgcttcaacagttcgtgcgaggcaagcacgaccgaacctccaaggacattgtctacacctacgactctccctttgcacaggacgtcaagcgaactatgcgagaggtcatgaaaggtcggaactggtatgccacacctggattctggctgcgaaccgttggcatcattgctgtcaccgccttttgcgagtggcactgggctactaccggaatggtgctgtggggtctcttgactggattcatgcacatgcagatcggcctgtccattcagcacgatgcctctcatggtgccatcagcaaaaagccctgggtcaacgctctctttgcctacggcatcgacgtcattggatcgtccagatggatctggctgcagtctcacatcatgcgacatcacacctacaccaatcagcatggtctcgacctggatgccgagtccgcagaaccattccttgtgttccacaactaccctgctgccaacactgctcgaaagtggtttcaccgattccaggcctggtacatgtacctcgtgcttggagcctacggcgtttcgctggtgtacaaccctctctacatcttccgaatgcagcacaacgacaccattcccgagtctgtcacagccatgcgagagaacggctttctgcgacggtaccgaacccttgcattcgttatgcgagctttcttcatctttcgaaccgccttcttgccctggtatctcactggaacctccctgctcatcaccattcctctggtgcccactgctaccggtgccttcctcaccttctttttcatcttgtctcacaacttcgatggctcggagcgaatccccgacaagaactgcaaggtcaagagctccgagaaggacgttgaagccgatcagatcgactggtacagagctcaggtggagacctcttccacctacggtggacccattgccatgttctttactggcggtctcaacttccagatcgagcatcacctctttcctcgaatgtcgtcttggcactatcccttcgtgcagcaagctgtccgagagtgttgcgaacgacacggagttcggtacgtcttctaccctaccattgtgggcaacatcatttccaccctcaagtacatgcacaaagtcggtgtggttcactgtgtcaaggacgctcaggattcctaagcggccgcaagtgtggatggggaagtgagtgcccggttctgtgtgcacaattggcaatccaagatggatggattcaacacagggatatagcgagctacgtggtggtgcgaggatatagcaacggatatttatgtttgacacttgagaatgtacgatacaagcactgtccaagtacaatactaaacatactgtacatactcatactcgtacccgggcaacggtttcacttgagtgcagtggctagtgctcttactcgtacagtgtgcaatactgcgtatcatagtctttgatgtatatcgtattcattcatgttagttgcgtacgctgtgttgttgtatgtggtgaagcttgacaatggatggtgtgtcgtatcaggctggggaacaattgtgcttaagtatgctgcagttgagtaagagtcatcgctccaccaaaataaagtttgccattagggttggagagagagatggtggctggaagaattaaatgacatcaagctgaggattgtgggtgtgcaataacacatgttaggggtgacctgtggctcgaaatctgataattattttgtaactttatgattattcttagattttttaatattcctctatataacacataagtagctgtcgtctagttgttcatagcctgactcctgcaatagattagtgcagagtgattttgtgcaattgagagccacggttgagtcaagtgactttgtgtgtgaagtcatcttacgtttcaagtctcacaggttactcaattggttggttgtctgccctttacagatatttacagtacctgagcgtaaagtcgttcatccacggaatgactgttcctgtcacgcagtcatgatcatggatgtggctggtcaggaaccattttggataggagacttagggattggactattattgaaaaaactgagccgaatatgatatagttctatttgaatgcagaacttctgatggtcaattcacttatttcaggcatatcggtcatggtggcagctgccacgatgttatctcgttggaaacctcggcgcgccagctgcattaatgaatcggccaacgcgcggggagaggcggtttgcgtattgggcgctcttccgcttcctcgctcactgactcgctgcgctcggtcgttcggctgcggcgagcggtatcagctcactcaaaggcggtaatacggttatccacagaatcaggggataacgcaggaaagaacatgtgagcaaaaggccagcaaaaggccaggaaccgtaaaaaggccgcgttgctggcgtttttccataggctccgcccccctgacgagcatcacaaaaatcgacgctcaagtcagaggtggcgaaacccgacaggactataaagataccaggcgtttccccctggaagctccctcgtgcgctctcctgttccgaccctgccgcttaccggatacctgtccgcctttctcccttcgggaagcgtggcgctttctcatagctcacgctgtaggtatctcagttcggtgtaggtcgttcgctccaagctgggctgtgtgcacgaaccccccgttcagcccgaccgctgcgccttatccggtaactatcgtcttgagtccaacccggtaagacacgacttatcgccactggcagcagccactggtaacaggattagcagagcgaggtatgtaggcggtgctacagagttcttgaagtggtggcctaactacggctacactagaagaacagtatttggtatctgcgctctgctgaagccagttaccttcggaaaaagagttggtagctcttgatccggcaaacaaaccaccgctggtagcggtggtttttttgtttgcaagcagcagattacgcgcagaaaaaaaggatctcaagaagatcctttgatcttttctacggggtctgacgctcagtggaacgaaaactcacgttaagggattttggtcatgagattatcaaaaaggatcttcacctagatccttttaaattaaaaatgaagttttaaatcaatctaaagtatatatgagtaaacttggtctgacagttaccaatgcttaatcagtgaggcacctatctcagcgatctgtctatttcgttcatccatagttgcctgactccccgtcgtgtagataactacgatacgggagggcttaccatctggccccagtgctgcaatgataccgcgagacccacgctcaccggctccagatttatcagcaataaaccagccagccggaagggccgagcgcagaagtggtcctgcaactttatccgcctccatccagtctattaattgttgccgggaagctagagtaagtagttcgccagttaatagtttgcgcaacgttgttgccattgctacaggcatcgtggtgtcacgctcgtcgtttggtatggcttcattcagctccggttcccaacgatcaaggcgagttacatgatcccccatgttgtgcaaaaaagcggttagctccttcggtcctccgatcgttgtcagaagtaagttggccgcagtgttatcactcatggttatggcagcactgcataattctcttactgtcatgccatccgtaagatgcttttctgtgactggtgagtactcaaccaagtcattctgagaatagtgtatgcggcgaccgagttgctcttgcccggcgtcaatacgggataataccgcgccacatagcagaactttaaaagtgctcatcattggaaaacgttcttcggggcgaaaactctcaaggatcttaccgctgttgagatccagttcgatgtaacccactcgtgcacccaactgatcttcagcatcttttactttcaccagcgtttctgggtgagcaaaaacaggaaggcaaaatgccgcaaaaaagggaataagggcgacacggaaatgttgaatactcatactcttcctttttcaatattattgaagcatttatcagggttattgtctcatgagcggatacatatttgaatgtatttagaaaaataaacaaataggggttccgcgcacatttccccgaaaagtgccacctgatgcggtgtgaaataccgcacagatgcgtaaggagaaaataccgcatcaggaaattgtaagcgttaatattttgttaaaattcgcgttaaatttttgttaaatcagctcattttttaaccaataggccgaaatcggcaaaatcccttataaatcaaaagaatagaccgagatagggttgagtgttgttccagtttggaacaagagtccactattaaagaacgtggactccaacgtcaaagggcgaaaaaccgtctatcagggcgatggcccactacgtgaaccatcaccctaatcaagttttttggggtcgaggtgccgtaaagcactaaatcggaaccctaaagggagcccccgatttagagcttgacggggaaagccggcgaacgtggcgagaaaggaagggaagaaagcgaaaggagcgggcgctagggcgctggcaagtgtagcggtcacgctgcgcgtaaccaccacacccgccgcgcttaatgcgccgctacagggcgcgtccattcgccattcaggctgcgcaactgttgggaagggcgatcggtgcgggcctcttcgctattacgccagctggcgaaagggggatgtgctgcaaggcgattaagttgggtaacgccagggttttcccagtcacgacgttgtaaaacgacggccagtgaattgtaatacgactcactatagggcgaattgggcccgacgtcgcatgcattccatagccacacctttgcctatggcttcacaaccgaaggcaattcgagaggtcgcgcttatggaatcgactcgtataaagctgaagggaaagggagacgttccgagcgctcagatgcaatagtcgtccagctaatgtggattcaaaaacaaccccaacagtaatcttgaaaatttgaacggatcaatctgaacactcttgctccaggtcattcttctaacgcacatccccagagtctagagggagttgtgttgtgaacatcctaataaacaatgcaatggattcgggatatcttctgtctcgccccctactcgatgtcgagtaaaccgatcaccaactaacaatactcctccgcgttctgccattgactctcaaacagacatcgctatcaacggaacagcatattttagcttcttaggacaataaatattgataatgccggctctccctcggtatattaagcaatccattcatacactcattcatcaggttaattttatatatataatttgtctattcaaacaccgtaaattactggtaccatcatctcctccttttcaaatacacgtctatttgcattaatgaaattactcgccaattcgcagaacgtgtttgtcgaacagagccttagctcgggtccagacaggagcagtgtctcgctgaggaagctgcaggagagttaattaactcacctgcaggattgagactatgaatggattcccgtgcccgtattactctactaatttgatcttggaacgcgaaaatacgtttctaggactccaaagaatctcaactcttgtccttactaaatatactacccatagttgatggtttacttgaacagagaggacatgttcacttgacccaaagtttctcgcatctcttggatatttgaacaacggcgtccactgaccgtcagttatccagtcacaaaacccccacattcatacattcccatgtacgtttacaaagttctcaattccatcgtgcaaatcaaaatcacatctattcattcatcatatataaacccatcatgtctactaacactcacaactccatagaaaacatcgactcagaacacacgctccatgcggccgcttaggaatcctgtgcgtccttcacgcagtggacgacacccaccttatgcatgtacttcagggtggagatgatgttgccgacgatggtagggtagaaaacatatcgcactccatgtcgttcgcaacactcccggaccgcctgctggacgaaggggtagtgccaagacgacatccggggaaagaggtggtgctcgatctggaaattgagaccgccagtgaagaacatggcgatggggccaccgtatgtggaggacgtctccacctgcgcccgataccagtcaatttggtcagcctcaacgtccttctcagatcgcttaaccttgcagttcttgtcggggatccgttcggagccatcaaaattgtgggacaaaatgaagaagaacgtcaagaaggcaccagttgcggtgggcaccagaggaatggtgatcagcaatgaggtcccagtgaggtaccagggcaagaatgcggtccggaagatgaagaaagctcgcatcacgaatgcaagtgtgcggtagcgccgcagaaagccattttcccgcatggccgtgacagactctgggatggtgtcattgtgctgcatccggaaaatgtagagcgggttgtacaccagcgataccccgtatgcccccagcacaaggtacatgtaccaagcctggaagcggtggaaccactttcgggcggtgtttgcggcggggtagttgtggaacaccaggaacggctctgccgactccgcatccaggtcgaggccgtgctggttggtgtaggtgtggtgccgcatgatgtgcgactgcagccaaatccaccgggacgatccgatgacgtcaatgccgtaggcgaagagggcgttgacccaaggcttcttgctgatggccccgtgggacgcatcatgctggatggataagccgatctgcatgtgcatgaatccagtcaacaggccccacagcaccatccccgtggtagcccagtgccactcgcaaaaggccgtcacggcgatgatcccaacggtgcgcagccagaagccaggggttgcgtaccagttcctccctttcatcacctcgcgcattgtccgcttaacgtcttgtgcgaagggagaatcatacgtgtagacaatgtccttcgaggtgcggtcatgcttccctcggacgaactgttgaagcaatttggagttctccggtttgacgtatggatgcattgaataaaagagaggggaggcatcagaggcaccagaagcgagaatcaaatctcctcctggatgaactttggcaagcccttcaaggtcgtagaggatgccatcaatcgcaaccaaatcagggcgttctaacagctgttctgtggtaagactgagagccatggagagctgggttagtttgtgtagagagtgtgtgttgctagcgactttcggattgtgtcattacacaaaacgcgtcgtctcgacactgatcttgtcgtggatactcacggctcggacatcgtcgccgacgatgacaccggactttcgcttaaggacgtcagtaacaggcattgtgtgatgtgtagtttagatttcgaatctgtggggaaagaaaggaaaaaagagactggcaaccgattgggagagccactgtttatatataccctagacaagccccccgcttgtaagatgttggtcaatgtaaaccagtattaaggttggcaagtgcaggagaagcaaggtgtgggtaccgagcaatggaaatgtgcggaaggcaaaaaaatgaggccacggcctattgtcggggctatatccagggggcgattgaagtacactaacatgacatgtgtccacagaccctcaatctggcctgatgagccaaatccatacgcgctttcgcagctctaaaggctataacaagtcacaccaccctgctcgacctcagcgccctcactttttgttaagacaaactgtacacgctgttccagcgttttctgcctgcacctggtgggacatttggtgcaacctaaagtgctcggaacctctgtggtgtccagatcagcgcagcagttccgaggtagttttgaggcccttagatgatgcaatggtgtcagtcgctggatcacgagtcttaatggcagtattcgttcttatttgtgccattgagccccgttatcctcgtatcttctaccccccatcccatccctttgttggtgcaaccctacccatttattgttgggtgcagcccaaccgacgtggagagcttggcttggccatataaaaaggcccccccctagtggcaatggcagaaagtcagctgtgagttgttgaatttgtcatctaggcggcctggccgtcttctccggggcaattggggctgttttttgggacacaaatacgccgccaacccggtctctcctgaattccgtcgtcgcctgagtcgacatcatttatttaccagttggccacaaacccttgacgatctcgtatgtcccctccgacatactcccggccggctggggtacgttcgatagcgctatcggcatcgacaaggtttgggtccctagccgataccgcactacctgagtcacaatcttcggaggtttagtcttccacatagcacgggcaaaagtgcgtatatatacaagagcgtttgccagccacagattttcactccacacaccacatcacacatacaaccacacacatccacaatggaacccgaaactaagaagaccaagactgactccaagaagattgttcttctcggcggcgacttctgtggccccgaggtgattgccgaggccgtcaaggtgctcaagtctgttgctgaggcctccggcaccgagtttgtgtttgaggaccgactcattggaggagctgccattgagaaggagggcgagcccatcaccgacgctactctcgacatctgccgaaaggctgactctattatgctcggtgctgtcggaggcgctgccaacaccgtatggaccactcccgacggacgaaccgacgtgcgacccgagcagggtctcctcaagctgcgaaaggacctgaacctgtacgccaacctgcgaccctgccagctgctgtcgcccaagctcgccgatctctcccccatccgaaacgttgagggcaccgacttcatcattgtccgagagctcgtcggaggtatctactttggagagcgaaaggaggatgacggatctggcgtcgcttccgacaccgagacctactccgttcctgaggttgagcgaattgcccgaatggccgccttcctggcccttcagcacaacccccctcttcccgtgtggtctcttgacaaggccaacgtgctggcctcctctcgactttggcgaaagactgtcactcgagtcctcaaggacgaactcccccagctcgagctcaaccaccagctgatcgactcggccgccatgatcctcatcaagcagccctccaagatgaatggtatcatcatcaccaccaacatgtttggcgatatcatctccgacgaggcctccgtcatccccggttctctgggtctgctgccctccgcctctctggcttctctgcccgacaccaacgaggcgttcggtctgtacgagccctgtcacggatctgcccccgatctcggcaagcagaaggtcaaccccattgccaccattctgtctgccgccatgatgctcaagttctctcttaacatgaagcccgccggtgacgctgttgaggctgccgtcaaggagtccgtcgaggctggtatcactaccgccgatatcggaggctcttcctccacctccgaggtcggagacttgttgccaacaaggtcaaggagctgctcaagaaggagtaagtcgtttctacgacgcattgatggaaggagcaaactgacgcgcctgcgggttggtctaccggcagggtccgctagtgtataagactctataaaaagggccctgccctgctaatgaaatgatgatttataatttaccggtgtagcaaccttgactagaagaagcagattgggtgtgtttgtagtggaggacagtggtacgttttggaaacagtcttcttgaaagtgtcttgtctacagtatattcactcataacctcaatagccaagggtgtagtcggtttattaaaggaagggagttgtggctgatgtggatatcgatagttggagcaagggagaaatgtagagtgtgaaagactcactatggtccgggcttatctcgaccaatagccaaagtctggagtttctgagagaaaaaggcaagatacgtatgtaacaaagcgacgcatggtacaataataccggaggcatgtatcatagagagttagtggttcgatgatggcactggtgcctggtatgactttatacggctgactacatatttgtcctcagacatacaattacagtcaagcacttacccttggacatctgtaggtaccccccggccaagacgatctcagcgtgtcgtatgtcggattggcgtagctccctcgctcgtcaattggctcccatctactttcttctgcttggctacacccagcatgtctgctatggctcgttttcgtgccttatctatcctcccagtattaccaactctaaatgacatgatgtgattgggtctacactttcatatcagagataaggagtagcacagttgcataaaaagcccaactctaatcagcttcttcctttcttgtaattagtacaaaggtgattagcgaaatctggaagcttagttggccctaaaaaaatcaaaaaaagcaaaaaacgaaaaacgaaaaaccacagttttgagaacagggaggtaacgaaggatcgtatatatatatatatatatatatacccacggatcccgagaccggcctttgattcttccctacaaccaaccattctcaccaccctaattcacaaccatggctcccgacgccgacaagctgcgacagcgaaaggctcagtccatccaggacactgccgattctcaggctaccgagctcaagattggcaccctgaagggtctccaaggcaccgagatcgtcattgatggcgacatctacgacatcaaagacttcgatcaccctggaggcgaatccatcatgacctttggtggcaacgacgttactgccacctacaagatgattcatccctaccactcgaagcatcacctggagaagatgaaaaaggtcggtcgagtgcccgactacacctccgagtacaagttcgatactcccttcgaacgagagatcaaacaggaggtcttcaagattgtgcgaagaggtcgagagtttggaacacctggctacttctttcgagccttctgctacatcggtctcttcttttacctgcagtatctctgggttaccactcctaccactttcgcccttgctatcttctacggtgtgtctcaggccttcattggcctgaacgtccagcacgacgccaaccacggagctgcctccaaaaagccctggatcaacaatttgctcggcctgggtgccgactttatcggaggctccaagtggctctggatgaaccagcactggacccatcacacttacaccaaccatcacgagaaggatcccgacgccctgggtgcagagcctatgctgctcttcaacgactatcccttgggtcaccccaagcgaaccctcattcatcacttccaagccttctactatctgtttgtccttgctggctactgggtgtcttcggtgttcaaccctcagatcctggacctccagcaccgaggtgcccaggctgtcggcatgaagatggagaacgactacattgccaagtctcgaaagtacgctatcttcctgcgactcctgtacatctacaccaacattgtggctcccatccagaaccaaggcttttcgctcaccgtcgttgctcacattcttactatgggtgtcgcctccagcctgaccctcgctactctgttcgccctctcccacaacttcgagaacgcagatcgggatcccacctacgaggctcgaaagggaggcgagcctgtctgttggttcaagtcgcaggtggaaacctcctctacttacggtggcttcatttccggttgccttacaggcggactcaactttcaggtcgagcatcacctgtttcctcgaatgtcctctgcctggtacccctacatcgctcctaccgttcgagaggtctgcaaaaagcacggcgtcaagtacgcctactatccctgggtgtggcagaacctcatctcgaccgtcaagtacctgcatcagtccggaactggctcgaactggaagaacggtgccaatccctactctggcaagctgtaagcggccgcatgtacatacaagattatttatagaaatgaatcgcgatcgaacaaagagtacgagtgtacgagtaggggatgatgataaaagtggaagaagttccgcatctttggatttatcaacgtgtaggacgatacttcctgtaaaaatgcaatgtctttaccataggttctgctgtagatgttattaactaccattaacatgtctacttgtacagttgcagaccagttggagtatagaatggtacacttaccaaaaagtgttgatggttgtaactacgatatataaaactgttgacgggatctgcgtacactgttt

SEQ ID NO: 58 - DNA, 911 bp, Pantoea stewartii DC413
atggctatcttcgctgagagagactccactctcatctactctgatcctctgatgctccttgccatcattgagcagcgtctcgaccgacttctgcctgtcgaatccgagcgagactgcgttggtctcgccatgcgagaaggcgctttggcacccggaaagcgaatcagacctgtccttctcatgctggctgcccacgaccttggctaccgagacgaactctctggacttctcgacttcgcctgtgctgtcgagatggttcacgcagcctccctgatcctggatgacattccctgcatggacgatgccgagcttcgacgtggccgacctaccatccatcgacagttcggtgaacccgtggctatcctcgcagccgttgctctgctttcacgagccttcggagtcattgctctggcagacggcatctcttcccaggccaagactcaggccgtggctgagcttagccactccgtcggtattcagggtctggttcaaggacagtttctcgatctgaccgaaggaggtcaaccacgatccgctgatgccattcagcttaccaaccacttcaagacttctgccctgttttcggctgccatgcagatggctgccatcattgctggtgctcctctggcatcccgagagaagttgcatcgtttcgctcgagacctcggacaagcctttcagctgctcgacgatctgacagacggccagagcgacactggcaaggatgcccatcaggacgtcggaaagtctaccctggtcaacatgttgggttccaaagcagtcgagaagcgactgagagaccacttgcgacgtgccgatcgacatctcgcttctgcctgtgactccggatacgccacccgacactttgtgcaggcttggttcgacaaaaagctcgcaatggtcggttaagc

SEQ ID NO: 59 - protein, 302 aa, Pantoea stewartii DC413
MAIFAERDSTLIYSDPLMLLAIIEQRLDRLLPVESERDCVGLAMREGALAPGKRIRPVLLMLAAHDLGYRDELSGLLDFACAVEMVHAASLILDDIPCMDDAELRRGRPTIHRQFGEPVAILAAVALLSRAFGVIALADGISSQAKTQAVAELSHSVGIQGLVQGQFLDLTEGGQPRSADAIQLTNHFKTSALFSAAMQMAAIIAGAPLASREKLHRFARDLGQAFQLLDDLTDGQSDTGKDAHQDVGKSTLVNMLGSKAVEKRLRDHLRRADRHLASACDSGYATRHFVQAWFDKKLAMVG

SEQ ID NO: 60 - DNA, 936 bp, Pantoea stewartii DC413
atggacaaccctactctcctgcaccatgctgtcgagactatggaggttggatccaagtcgttcgctaccgcttccaagctctttgacgccaagactcgacgttctgtcctgatgctctacgcttggtgtcgacactgtgacgatgtcatcgacgatcagcaactcggctttcctggtgaggttccctctgcacagacacctcaacagcgacttgctaacctcgaacgaaagactcgacaggcctacgctggagctcagatgcacgaacctgccttcgctgccttccaggaggttgccattgctcacgacatctctccagcatacgccttcgatcatctcgaaggctttgctatggacgttcgaggtgctagatacgagaccttccaggacactctgcgatactgttaccacgttgctggagtcgttggtctcatgatggctcagatcatgggagttcgagacgaagccgtgctggatcgagcttgtgacctcggtctggcctttcagcttaccaacattgctcgagacattgtcgaggatgcacgagttggacgttgctacctgcctgagtcctggctcgaggaagctggactcgatcgactgcacttcgctgacagagcccatcgacctgctcttgccaacttggcacgaagactcgtctccgaggctgaaccctactatgcctctgccagcgctggcctcgcaggtcttcccttgcgatctgcctgggctattgcaactgccaaggaagtctacagacgaatcggagtgaaggtttacggtgctggcgagactgcctgggacagacgacagtctacctcgaagcaggagaagctcctgcttctggctgcaggagctgcccaagctatccgatcccgtgccgctgcatctcctccacgacctgcagagttgtggcagcgacctcgttaagcggcc

SEQ ID NO: 61 - protein, 309 aa, Pantoea stewartii DC413
MDNPTLLHHAVETMEVGSKSFATASKLFDAKTRRSVLMLYAWCRHCDDVIDDQQLGFPGEVPSAQTPQQRLANLERKTRQAYAGAQMHEPAFAAFQEVAIAHDISPAYAFDHLEGFAMDVRGARYETFQDTLRYCYHVAGVVGLMMAQIMGVRDEAVLDRACDLGLAFQLTNIARDIVEDARVGRCYLPESWLEEAGLDRLHFADRAHRPALANLARRLVSEAEPYYASASAGLAGLPLRSAWAIATAKEVYRRIGVKVYGAGETAWDRRQSTSKQEKLLLLAAGAAQAIRSRAAASPPRPAELWQRPR

SEQ ID NO: 62 - DNA, 1484 bp, Pantoea stewartii DC413
atggctcacaccactgtcatcggagctggctttggtggactggctctcgccattcgactgcaggctgcaggcgttcccacccgacttctggagcagcgagacaagcctggtggcagagcctacgtgtaccaggaccaaggcttcacctttgatgctggacccactgtcattaccgatccctccgccatcgaagagctcttcgctcttgccggcaagtccatgcgagactacgttgagctgcttcccgttacccctttctaccgactctgctgggagactggcgaggtctttaactacgataacgatcaggctcgactggaagccgagattcggaagttcaatcctgccgacgtggctggctatcagcgattcctcgactactctcgagccgtcttcgcagaaggttacctcaagttgggaaccgttccctttctgtcctttcgagacatgcttcgagccgctcctcagctcgcacgtcttcaggcttggcgatctgtctactccaaggtggccagcttcattgaggatgacaagctgagacaagccttctcctttcactcgttgctcgttggtggcaacccattcgctacttcctctatctacaccctgattcatgcattggagcgagaatggggtgtctggtttcctcgaggtggcacaggagctctggttcagggtatgctcaagctgttccaggacttgggtggaaccctggagctcaacgccagagtctctcacatcgaggccaaggaggctgccatttccgcagtgcacttggaggatggtcgagtcttcgaaactcgagctgttgcctccaacgccgacgtggttcatacctatggcgatcttctcggaagacatcccgctgcagccgctcaggccaaaaagctgaagggcaagcgaatgtcgaactccttgtttgtcctctacttcggactgaaccaccatcacgaccagcttgctcatcacaccgtctgcttcggtcctcgataccgtgagctcattgacgaaatcttcaaccgagatggacttgccgaagacttctctctctaccttcatgctccctgtgtgactgatccctcgcttgcacctcccggatgtggcagctactatgtcctggctcccgttcctcaccttggtacagccgatctcgactggaacgtcgagggtcctcgactgagagaccgaatctttgcctatctcgaagagcactacatgcctggactgcgatctcaactggttactcatcgaatcttcactcccttcgactttcgagatcagctcaatgcctaccaaggttccgcattctcggtggagcccatcttgagacagtctgcttggtttcgacctcacaaccgagactcgcacattcggaatctctatctggtcggtgccggaacccatcccggtgctggcattcctggagtgatcggttctgccaaggctactgcctccctgatgctcgaggatctgcacgcctaagc

SEQ ID NO: 63 - protein, 493 aa, Pantoea stewartii DC413
MAHTTVIGAGFGGLALAIRLQAAGVPTRLLEQRDKPGGRAYVYQDQGFTFDAGPTVITDPSAIEELFALAGKSMRDYVELLPVTPFYRLCWETGEVFNYDNDQARLEAEIRKFNPADVAGYQRFLDYSRAVFAEGYLKLGTVPFLSFRDMLRAAPQLARLQAWRSVYSKVASFIEDDKLRQAFSFHSLLVGGNPFATSSIYTLIHALEREWGVWFPRGGTGALVQGMLKLFQDLGGTLELNARVSHIEAKEAAISAVHLEDGRVFETRAVASNADVVHTYGDLLGRHPAAAAQAKKLKGKRMSNSLFVLYFGLNHHHDQLAHHTVCFGPRYRELIDEIFNRDGLAEDFSLYLHAPCVTDPSLAPPGCGSYYVLAPVPHLGTADLDWNVEGPRLRDRIFAYLEEHYMPGLRSQLVTHRIFTPFDFRDQLNAYQGSAFSVEPILRQSAWFRPHNRDSHIRNLYLVGAGTHPGAGIPGVIGSAKATASLMLEDLHA

SEQ ID NO: 64 - DNA, 11337 bp, artificial sequence
  Plasmid pZKleuN-6EP
cgatcgaggaagaggacaagcggctgcttcttaagtttgtgacatcagtatccaaggcaccattgcaaggattcaaggctttgaacccgtcatttgccattcgtaacgctggtagacaggttgatcggttccctacggcctccacctgtgtcaatcttctcaagctgcctgactatcaggacattgatcaacttcggaagaaacttttgtatgccattcgatcacatgctggtttcgatttgtcttagaggaacgcatatacagtaatcatagagaataaacgatattcatttattaaagtagatagttgaggtagaagttgtaaagagtgataaatagcggccgcttactggagctttctggccttctccttggcagcgtcagccttggcctgcttggcgagcttggcgttctttcggtaaaagttgtagaagagaccgagcatggtccacatgtagaaccagagcagagcggtgatgaagaaggggtatccaggtcggccaaggaccttcatggcgtacatgtcccaggaagactggacagacatcatgcagaactgggtcatctgggatcgagtgatgtagaacttgatgaacgacacctgcttgaagcccagggcagacagaaagtagtagccgtacatgatgacgtggatgaaggagttcagggcagcagagaagtaggcttcaccgttgggagcaacgaaggtgaccagccaccagatggtgaagatggaagagtggtggtacacgtgcagaaaggaaatctgtcggttgttcttcttgaggaccatgatcatggtgtcgacaaactccatgatcttggagaagtagaagagccagatcatcttagccatagggagacccttgaaggtgtgatcggcagcgttctcaaacagtccatagttggcctgataagcctcgtacaggatgccaccgcacatgtaggcggagatggagaccagacagaagttgtgcaggagggagaaggtcttgacctcgaatcgttcaaagttcttcatgatctgcatacccacaaacacggtgaccaggtaggcgagcacgatcaggagcacgtggaaggggttcatcagaggcagctctcgagccaggggagactccacggcaaccaggaagcctcgagtgtgatggacaatggtgggaatgtacttctcggcctgggcaaccagggcagcctccaggggatcgacgtagggagcagctcggacaccgatagcgctggcgaggtccatgaacaggtcctgaggcatcttggagggcaggaagggagcaatggactccatgggcaggacctgtgttagtacattgtcggggagtcatcaattggttcgacaggttgtcgactgttagtatgagctcaattgggctctggtgggtcgatgacacttgtcatctgtttctgttgggtcatgtttccatcaccttctatggtactcacaattcgtccgattcgcccgaatccgttaataccgactttgatggccatgttgatgtgtgtttaattcaagaatgaatatagagaagagaagaagaaaaaagattcaattgagccggcgatgcagacccttatataaatgttgccttggacagacggagcaagcccgcccaaacctacgttcggtataatatgttaagctttttaacacaaaggtttggcttggggtaacctgatgtggtgcaaaagaccgggcgttggcgagccattgcgcgggcgaatggggccgtgactcgtctcaaattcgagggcgtgcctcaattcgtgcccccgtggctttttcccgccgtttccgccccgtttgcaccactgcagccgcttctttggttcggacaccttgctgcgagctaggtgccttgtgctacttaaaaagtggcctcccaacaccaacatgacatgagtgcgtgggccaagacacgttggcggggtcgcagtcggctcaatggcccggaaaaaacgctgctggagctggttcggacgcagtccgccgcggcgtatggatatccgcaaggttccatagcgccattgccctccgtcggcgtctatcccgcaacctctaaatagagcgggaatataacccaagcttcttttttttcctttaacacgcacacccccaactatcatgttgctgctgctgtttgactctactctgtggaggggtgctcccacccaacccaacctacaggtggatccggcgctgtgattggctgataagtctcctatccggactaattctgaccaatgggacatgcgcgcaggacccaaatgccgcaattacgtaaccccaacgaaatgcctacccctctttggagcccagcggccccaaatccccccaagcagcccggttctaccggcttccatctccaagcacaagcagcccggttctaccggcttccatctccaagcacccctttctccacaccccacaaaaagacccgtgcaggacatcctactgcgtgtttaaacaccactaaaaccccacaaaatatatcttaccgaatatacagatctactatagaggaacaattgccccggagaagacggccaggccgcctagatgacaaattcaacaactcacagctgactttctgccattgccactaggggggggcctttttatatggccaagccaagctctccacgtcggttgggctgcacccaacaataaatgggtagggttgcaccaacaaagggatgggatggggggtagaagatacgaggataacggggctcaatggcacaaataagaacgaatactgccattaagactcgtgatccagcgactgacaccattgcatcatctaagggcctcaaaactacctcggaactgctgcgctgatctggacaccacagaggttccgagcactttaggttgcaccaaatgtcccaccaggtgcaggcagaaaacgctggaacagcgtgtacagtttgtcttaacaaaaagtgagggcgctgaggtcgagcagggtggtgtgacttgttatagcctttagagctgcgaaagcgcgtatggatttggctcatcaggccagattgagggtctgtggacacatgtcatgttagtgtacttcaatcgccccctggatatagccccgacaataggccgtggcctcatttttttgccttccgcacatttccattgctcggtacccacaccttgcttctcctgcacttgccaaccttaatactggtttacattgaccaacatcttacaagcggggggcttgtctagggtatatataaacagtggctctcccaatcggttgccagtctcttttttcctttctttccccacagattcgaaatctaaactacacatcacacaatgcctgttactgacgtccttaagcgaaagtccggtgtcatcgtcggcgacgatgtccgagccgtgagtatccacgacaagatcagtgtcgagacgacgcgttttgtgtaatgacacaatccgaaagtcgctagcaacacacactctctacacaaactaacccagctctccatggctgccgctccctctgtgcgaacctttacccgagccgaggttctgaacgctgaggctctgaacgagggcaagaaggacgctgaggctcccttcctgatgatcatcgacaacaaggtgtacgacgtccgagagttcgtccctgaccatcctggaggctccgtgattctcacccacgttggcaaggacggcaccgacgtctttgacacctttcatcccgaggctgcttgggagactctcgccaacttctacgttggagacattgacgagtccgaccgagacatcaagaacgatgactttgccgctgaggtccgaaagctgcgaaccctgttccagtctctcggctactacgactcctctaaggcctactacgccttcaaggtctccttcaacctctgcatctggggactgtccaccgtcattgtggccaagtggggtcagacctccaccctcgccaacgtgctctctgctgccctgctcggcctgttctggcagcagtgcggatggctggctcacgactttctgcaccaccaggtcttccaggaccgattctggggtgatctcttcggagccttcctgggaggtgtctgccagggcttctcctcttcctggtggaaggacaagcacaacactcaccatgccgctcccaacgtgcatggcgaggatcctgacattgacacccaccctctcctgacctggtccgagcacgctctggagatgttctccgacgtccccgatgaggagctgacccgaatgtggtctcgattcatggtcctgaaccagacctggttctacttccccattctctccttcgctcgactgtcttggtgcctccagtccattctctttgtgctgcccaacggtcaggctcacaagccctccggagctcgagtgcccatctccctggtcgagcagctgtccctcgccatgcactggacctggtacctcgctaccatgttcctgttcatcaaggatcctgtcaacatgctcgtgtacttcctggtgtctcaggctgtgtgcggaaacctgctcgccatcgtgttctccctcaaccacaacggtatgcctgtgatctccaaggaggaggctgtcgacatggatttctttaccaagcagatcatcactggtcgagatgtccatcctggactgttcgccaactggttcaccggtggcctgaactaccagatcgagcatcacctgttcccttccatgcctcgacacaacttctccaagatccagcctgccgtcgagaccctgtgcaagaagtacaacgtccgataccacaccactggtatgatcgagggaactgccgaggtcttctcccgactgaacgaggtctccaaggccacctccaagatgggcaaggctcagtaagcggccgcatgagaagataaatatataaatacattgagatattaaatgcgctagattagagagcctcatactgctcggagagaagccaagacgagtactcaaaggggattacaccatccatatccacagacacaagctggggaaaggttctatatacactttccggaataccgtagtttccgatgttatcaatgggggcagccaggatttcaggcacttcggtgtctcggggtgaaatggcgttcttggcctccatcaagtcgtaccatgtcttcatttgcctgtcaaagtaaaacagaagcagatgaagaatgaacttgaagtgaaggaatttaaatgtaacgaaactgaaatttgaccagatattgtgtccgcggtggagctccagcttttgttccctttagtgagggttaatttcgagcttggcgtaatcatggtcatagctgtttcctgtgtgaaattgttatccgctcacaagcttccacacaacgtacgccaccattctgtctgccgccatgatgctcaagttctctcttaacatgaagcccgccggtgacgctgttgaggctgccgtcaaggagtccgtcgaggctggtatcactaccgccgatatcggaggctcttcctccacctccgaggtcggagacttgttgccaacaaggtcaaggagctgctcaagaaggagtaagtcgtttctacgacgcattgatggaaggagcaaactgacgcgcctgcgggttggtctaccggcagggtccgctagtgtataagactctataaaaagggccctgccctgctaatgaaatgatgatttataatttaccggtgtagcaaccttgactagaagaagcagattgggtgtgtttgtagtggaggacagtggtacgttttggaaacagtcttcttgaaagtgtcttgtctacagtatattcactcataacctcaatagccaagggtgtagtcggtttattaaaggaagggagttgtggctgatgtggatagatatctttaagctggcgactgcacccaacgagtgtggtggtagcttgttactgtatattcggtaagatatattttgtggggttttagtggtgtttggtaggttagtgcttggtatatgagttgtaggcatgacaatttggaaaggggtggactttgggaatattgtgggatttcaataccttagtttgtacagggtaattgttacaaatgatacaaagaactgtatttcttttcatttgttttaattggttgtatatcaagtccgttagacgagctcagtgggcgcgccagctgcattaatgaatcggccaacgcgcggggagaggcggtttgcgtattgggcgctcttccgcttcctcgctcactgactcgctgcgctcggtcgttcggctgcggcgagcggtatcagctcactcaaaggcggtaatacggttatccacagaatcaggggataacgcaggaaagaacatgtgagcaaaaggccagcaaaaggccaggaaccgtaaaaaggccgcgttgctggcgtttttccataggctccgcccccctgacgagcatcacaaaaatcgacgctcaagtcagaggtggcgaaacccgacaggactataaagataccaggcgtttccccctggaagctccctcgtgcgctctcctgttccgaccctgccgcttaccggatacctgtccgcctttctcccttcgggaagcgtggcgctttctcatagctcacgctgtaggtatctcagttcggtgtaggtcgttcgctccaagctgggctgtgtgcacgaaccccccgttcagcccgaccgctgcgccttatccggtaactatcgtcttgagtccaacccggtaagacacgacttatcgccactggcagcagccactggtaacaggattagcagagcgaggtatgtaggcggtgctacagagttcttgaagtggtggcctaactacggctacactagaagaacagtatttggtatctgcgctctgctgaagccagttaccttcggaaaaagagttggtagctcttgatccggcaaacaaaccaccgctggtagcggtggtttttttgtttgcaagcagcagattacgcgcagaaaaaaaggatctcaagaagatcctttgatcttttctacggggtctgacgctcagtggaacgaaaactcacgttaagggattttggtcatgagattatcaaaaaggatcttcacctagatccttttaaattaaaaatgaagttttaaatcaatctaaagtatatatgagtaaacttggtctgacagttaccaatgcttaatcagtgaggcacctatctcagcgatctgtctatttcgttcatccatagttgcctgactccccgtcgtgtagataactacgatacgggagggcttaccatctggccccagtgctgcaatgataccgcgagacccacgctcaccggctccagatttatcagcaataaaccagccagccggaagggccgagcgcagaagtggtcctgcaactttatccgcctccatccagtctattaattgttgccgggaagctagagtaagtagttcgccagttaatagtttgcgcaacgttgttgccattgctacaggcatcgtggtgtcacgctcgtcgtttggtatggcttcattcagctccggttcccaacgatcaaggcgagttacatgatcccccatgttgtgcaaaaaagcggttagctccttcggtcctccgatcgttgtcagaagtaagttggccgcagtgttatcactcatggttatggcagcactgcataattctcttactgtcatgccatccgtaagatgcttttctgtgactggtgagtactcaaccaagtcattctgagaatagtgtatgcggcgaccgagttgctcttgcccggcgtcaatacgggataataccgcgccacatagcagaactttaaaagtgctcatcattggaaaacgttcttcggggcgaaaactctcaaggatcttaccgctgttgagatccagttcgatgtaacccactcgtgcacccaactgatcttcagcatcttttactttcaccagcgtttctgggtgagcaaaaacaggaaggcaaaatgccgcaaaaaagggaataagggcgacacggaaatgttgaatactcatactcttcctttttcaatattattgaagcatttatcagggttattgtctcatgagcggatacatatttgaatgtatttagaaaaataaacaaataggggttccgcgcacatttccccgaaaagtgccacctgatgcggtgtgaaataccgcacagatgcgtaaggagaaaataccgcatcaggaaattgtaagcgttaatattttgttaaaattcgcgttaaatttttgttaaatcagctcattttttaaccaataggccgaaatcggcaaaatcccttataaatcaaaagaatagaccgagatagggttgagtgttgttccagtttggaacaagagtccactattaaagaacgtggactccaacgtcaaagggcgaaaaaccgtctatcagggcgatggcccactacgtgaaccatcaccctaatcaagttttttggggtcgaggtgccgtaaagcactaaatcggaaccctaaagggagcccccgatttagagcttgacggggaaagccggcgaacgtggcgagaaaggaagggaagaaagcgaaaggagcgggcgctagggcgctggcaagtgtagcggtcacgctgcgcgtaaccaccacacccgccgcgcttaatgcgccgctacagggcgcgtccattcgccattcaggctgcgcaactgttgggaagggcgatcggtgcgggcctcttcgctattacgccagctggcgaaagggggatgtgctgcaaggcgattaagttgggtaacgccagggttttcccagtcacgacgttgtaaaacgacggccagtgaattgtaatacgactcactatagggcgaattgggcccgacgtcgcatgctatcggcatcgacaaggtttgggtccctagccgataccgcactacctgagtcacaatcttcggaggtttagtcttccacatagcacgggcaaaagtgcgtatatatacaagagcgtttgccagccacagattttcactccacacaccacatcacacatacaaccacacacatccacaatggaacccgaaactaagaagaccaagactgactccaagaagattgttcttctcggcggcgacttctgtggccccgaggtgattgccgaggccgtcaaggtgctcaagtctgttgctgaggcctccggcaccgagtttgtgtttgaggaccgactcattggaggagctgccattgagaaggagggcgagcccatcaccgacgctactctcgacatctgccgaaaggctgactctattatgctcggtgctgtcggaggcgctgccaacaccgtatggaccactcccgacggacgaaccgacgtgcgacccgagcagggtctcctcaagctgcgaaaggacctgaacctgtacgccaacctgcgaccctgccagctgctgtcgcccaagctcgccgatctctcccccatccgaaacgttgagggcaccgacttcatcattgtccgagagctcgtcggaggtatctactttggagagcgaaaggaggatgacggatctggcgtcgcttccgacaccgagacctactccgttaattaactttggccggaattcctttacctgcaggataacttcgtataatgtatgctatacgaagttatgatctctctcttgagcttttccataacaagttcttctgcctccaggaagtccatgggtggtttgatcatggttttggtgtagtggtagtgcagtggtggtattgtgactggggatgtagttgagaataagtcatacacaagtcagctttcttcgagcctcatataagtataagtagttcaacgtattagcactgtacccagcatctccgtatcgagaaacacaacaacatgccccattggacagatcatgcggatacacaggttgtgcagtatcatacatactcgatcagacaggtcgtctgaccatcatacaagctgaacaagcgctccatacttgcacgctctctatatacacagttaaattacatatccatagtctaacctctaacagttaatcttctggtaagcctcccagccagccttctggtatcgcttggcctcctcaataggatctcggttctggccgtacagacctcggccgacaattatgatatccgttccggtagacatgacatcctcaacagttcggtactgctgtccgagagcgtctcccttgtcgtcaagacccaccccgggggtcagaataagccagtcctcagagtcgcccttaggtcggttctgggcaatgaagccaaccacaaactcggggtcggatcgggcaagctcaatggtctgcttggagtactcgccagtggccagagagcccttgcaagacagctcggccagcatgagcagacctctggccagcttctcgttgggagaggggactaggaactccttgtactgggagttctcgtagtcagagacgtcctccttcttctgttcagagacagtttcctcggcaccagctcgcaggccagcaatgattccggttccgggtacaccgtgggcgttggtgatatcggaccactcggcgattcggtgacaccggtactggtgcttgacagtgttgccaatatctgcgaactttctgtcctcgaacaggaagaaaccgtgcttaagagcaagttccttgagggggagcacagtgccggcgtaggtgaagtcgtcaatgatgtcgatatgggttttgatcatgcacacataaggtccgaccttatcggcaagctcaatgagctccttggtggtggtaacatccagagaagcacacaggttggttttcttggctgccacgagcttgagcactcgagcggcaaaggcggacttgtggacgttagctcgagcttcgtaggagggcattttggtggtgaagaggagactgaaataaatttagtctgcagaactttttatcggaaccttatctggggcagtgaagtatatgttatggtaatagttacgagttagttgaacttatagatagactggactatacggctatcggtccaaattagaaagaacgtcaatggctctctgggcgtcgcctttgccgacaaaaatgtgatcatgatgaaagccagcaatgacgttgcagctgatattgttgtcggccaaccgcgccgaaaacgcagctgtcagacccacagcctccaacgaagaatgtatcgtcaaagtgatccaagcacactcatagttggagtcgtactccaaaggcggcaatgacgagtcagacagatactcgtcgacgcgataacttcgtataatgtatgctatacgaagttatcgtacgatagttagtagacaacaat

SEQ ID NO: 65 - DNA, 6874 bp, artificial sequence
  Plasmid pEXPGUS1-P
aattcgtccttgaggactcgagtgacagtctttcgccaaagtcgagaggaggccagcacgttggccttgtcaagagaccacacgggaagaggggggttgtgctgaagggccaggaaggcggccattcgggcaattcgctcaacctcaggaacggagtaggtctcggtgtcggaagcgacgccagatccgtcatcctcctttcgctctccaaagtagatacctccgacgagctctcggacaatgatgaagtcggtgccctcaacgtttcggatgggggagagatcggcgagcttgggcgacagcagctggcagggtcgcaggttggcgtacaggttcaggtcctttcgcagcttgaggagaccctgctcgggtcgcacgtcggttcgtccgtcgggagtggtccatacggtgttggcagcgcctccgacagcaccgagcataatagagtcagcctttcggcagatgtcgagagtagcgtcggtgatgggctcgccctccttctcaatggcagctcctccaatgagtcggtcctcaaacacaaactcggtgccggaggcctcagcaacagacttgagcaccttgacggcctcggcaatcacctcggggccacagaagtcgccgccgagaagaacaatcttcttggagtcagtcttggtcttcttagtttcgggttccattgtggatgtgtgtggttgtatgtgtgatgtggtgtgtggagtgaaaatctgtggctggcaaacgctcttgtatatatacgcacttttgcccgtgctatgtggaagactaaacctccgaagattgtgactcaggtagtgcggtatcggctagggacccaaaccttgtcgatgccgatagcgctatcgaacgtaccccagccggccgggagtatgtcggaggggacatacgagatcgtcaagggtttgtggccaactggtaaataaatgatgtcgagggagtttggcgcccgttttttcgagccccacacgtttcggtgagtatgagcggcggcagattcgagcgtttccggtttccgcggctggacgagagcccatgatgggggctcccaccaccagcaatcagggccctgattacacacccacctgtaatgtcatgctgtttaaacatcgtggttaatgctgctgtgtgctgtgtgtgtgtgttgtttggcgctcattgttgcgttatgcagcgtacaccacaatattggaagcttattagcctttctattttttcgtttgcaaggcttaacaacattgctgtggagagggatggggatatggaggccgctggagggagtcggagaggcgttttggagcggcttggcctggcgcccagctcgcgaaacgcacctaggaccctttggcacgccgaaatgtgccacttttcagtctagtaacgccttacctacgtcattccatgcgtgcatgtttgcgccttttttcccttgcccttgatcgccacacagtacagtgcactgtacagtggaggttttgggggggtcttagatgggagctaaaagcggcctagcggtacactagtgggattgtatggagtggcatggagcctaggtggagcctgacaggacgcacgaccggctagcccgtgacagacgatgggtggctcctgttgtccaccgcgtacaaatgtttgggccaaagtcttgtcagccttgcttgcgaacctaattcccaattttgtcacttcgcacccccattgatcgagccctaacccctgcccatcaggcaatccaattaagctcgcattgtctgccttgtttagtttggctcctgcccgtttcggcgtccacttgcacaaacacaaacaagcattatatataaggctcgtctctccctcccaaccacactcacttttttgcccgtcttcccttgctaacacaaaagtcaagaacacaaacaaccaccccaacccccttacacacaagacatatctacagcaatggccatggtacgtcctgtagaaaccccaacccgtgaaatcaaaaaactcgacggcctgtgggcattcagtctggatcgcgaaaactgtggaattgatcagcgttggtgggaaagcgcgttacaagaaagccgggcaattgctgtgccaggcagttttaacgatcagttcgccgatgcagatattcgtaattatgcgggcaacgtctggtatcagcgcgaagtctttataccgaaaggttgggcaggccagcgtatcgtgctgcgtttcgatgcggtcactcattacggcaaagtgtgggtcaataatcaggaagtgatggagcatcagggcggctatacgccatttgaagccgatgtcacgccgtatgttattgccgggaaaagtgtacgtatcaccgtttgtgtgaacaacgaactgaactggcagactatcccgccgggaatggtgattaccgacgaaaacggcaagaaaaagcagtcttacttccatgatttctttaactatgccgggatccatcgcagcgtaatgctctacaccacgccgaacacctgggtggacgatatcaccgtggtgacgcatgtcgcgcaagactgtaaccacgcgtctgttgactggcaggtggtggccaatggtgatgtcagcgttgaactgcgtgatgcggatcaacaggtggttgcaactggacaaggcactagcgggactttgcaagtggtgaatccgcacctctggcaaccgggtgaaggttatctctatgaactgtgcgtcacagccaaaagccagacagagtgtgatatctacccgcttcgcgtcggcatccggtcagtggcagtgaagggcgaacagttcctgattaaccacaaaccgttctactttactggctttggtcgtcatgaagatgcggacttacgtggcaaaggattcgataacgtgctgatggtgcacgaccacgcattaatggactggattggggccaactcctaccgtacctcgcattacccttacgctgaagagatgctcgactgggcagatgaacatggcatcgtggtgattgatgaaactgctgctgtcggctttaacctctctttaggcattggtttcgaagcgggcaacaagccgaaagaactgtacagcgaagaggcagtcaacggggaaactcagcaagcgcacttacaggcgattaaagagctgatagcgcgtgacaaaaaccacccaagcgtggtgatgtggagtattgccaacgaaccggatacccgtccgcaagtgcacgggaatatttcgccactggcggaagcaacgcgtaaactcgacccgacgcgtccgatcacctgcgtcaatgtaatgttctgcgacgctcacaccgataccatcagcgatctctttgatgtgctgtgcctgaaccgttattacggatggtatgtccaaagcggcgatttggaaacggcagagaaggtactggaaaaagaacttctggcctggcaggagaaactgcatcagccgattatcatcaccgaatacggcgtggatacgttagccgggctgcactcaatgtacaccgacatgtggagtgaagagtatcagtgtgcatggctggatatgtatcaccgcgtctttgatcgcgtcagcgccgtcgtcggtgaacaggtatggaatttcgccgattttgcgacctcgcaaggcatattgcgcgttggcggtaacaagaaagggatcttcactcgcgaccgcaaaccgaagtcggcggcttttctgctgcaaaaacgctggactggcatgaacttcggtgaaaaaccgcagcagggaggcaaacaatgattaattaactagagcggccgccaccgcggcccgagattccggcctcttcggccgccaagcgacccgggtggacgtctagaggtacctagcaattaacagatagtttgccggtgataattctcttaacctcccacactcctttgacataacgatttatgtaacgaaactgaaatttgaccagatattgtgtccgcggtggagctccagcttttgttccctttagtgagggttaatttcgagcttggcgtaatcatggtcatagctgtttcctgtgtgaaattgttatccgctcacaattccacacaacatacgagccggaagcataaagtgtaaagcctggggtgcctaatgagtgagctaactcacattaattgcgttgcgctcactgcccgctttccagtcgggaaacctgtcgtgccagctgcattaatgaatcggccaacgcgcggggagaggcggtttgcgtattgggcgctcttccgcttcctcgctcactgactcgctgcgctcggtcgttcggctgcggcgagcggtatcagctcactcaaaggcggtaatacggttatccacagaatcaggggataacgcaggaaagaacatgtgagcaaaaggccagcaaaaggccaggaaccgtaaaaaggccgcgttgctggcgtttttccataggctccgcccccctgacgagcatcacaaaaatcgacgctcaagtcagaggtggcgaaacccgacaggactataaagataccaggcgtttccccctggaagctccctcgtgcgctctcctgttccgaccctgccgcttaccggatacctgtccgcctttctcccttcgggaagcgtggcgctttctcatagctcacgctgtaggtatctcagttcggtgtaggtcgttcgctccaagctgggctgtgtgcacgaaccccccgttcagcccgaccgctgcgccttatccggtaactatcgtcttgagtccaacccggtaagacacgacttatcgccactggcagcagccactggtaacaggattagcagagcgaggtatgtaggcggtgctacagagttcttgaagtggtggcctaactacggctacactagaaggacagtatttggtatctgcgctctgctgaagccagttaccttcggaaaaagagttggtagctcttgatccggcaaacaaaccaccgctggtagcggtggtttttttgtttgcaagcagcagattacgcgcagaaaaaaaggatctcaagaagatcctttgatcttttctacggggtctgacgctcagtggaacgaaaactcacgttaagggattttggtcatgagattatcaaaaaggatcttcacctagatccttttaaattaaaaatgaagttttaaatcaatctaaagtatatatgagtaaacttggtctgacagttaccaatgcttaatcagtgaggcacctatctcagcgatctgtctatttcgttcatccatagttgcctgactccccgtcgtgtagataactacgatacgggagggcttaccatctggccccagtgctgcaatgataccgcgagacccacgctcaccggctccagatttatcagcaataaaccagccagccggaagggccgagcgcagaagtggtcctgcaactttatccgcctccatccagtctattaattgttgccgggaagctagagtaagtagttcgccagttaatagtttgcgcaacgttgttgccattgctacaggcatcgtggtgtcacgctcgtcgtttggtatggcttcattcagctccggttcccaacgatcaaggcgagttacatgatcccccatgttgtgcaaaaaagcggttagctccttcggtcctccgatcgttgtcagaagtaagttggccgcagtgttatcactcatggttatggcagcactgcataattctcttactgtcatgccatccgtaagatgcttttctgtgactggtgagtactcaaccaagtcattctgagaatagtgtatgcggcgaccgagttgctcttgcccggcgtcaatacgggataataccgcgccacatagcagaactttaaaagtgctcatcattggaaaacgttcttcggggcgaaaactctcaaggatcttaccgctgttgagatccagttcgatgtaacccactcgtgcacccaactgatcttcagcatcttttactttcaccagcgtttctgggtgagcaaaaacaggaaggcaaaatgccgcaaaaaagggaataagggcgacacggaaatgttgaatactcatactcttcctttttcaatattattgaagcatttatcagggttattgtctcatgagcggatacatatttgaatgtatttagaaaaataaacaaataggggttccgcgcacatttccccgaaaagtgccacctgacgcgccctgtagcggcgcattaagcgcggcgggtgtggtggttacgcgcagcgtgaccgctacacttgccagcgccctagcgcccgctcctttcgctttcttcccttcctttctcgccacgttcgccggctttccccgtcaagctctaaatcgggggctccctttagggttccgatttagtgctttacggcacctcgaccccaaaaaacttgattagggtgatggttcacgtagtgggccatcgccctgatagacggtttttcgccctttgacgttggagtccacgttctttaatagtggactcttgttccaaactggaacaacactcaaccctatctcggtctattcttttgatttataagggattttgccgatttcggcctattggttaaaaaatgagctgatttaacaaaaatttaacgcgaattttaacaaaatattaacgcttacaatttccattcgccattcaggctgcgcaactgttgggaagggcgatcggtgcgggcctcttcgctattacgccagctggcgaaagggggatgtgctgcaaggcgattaagttgggtaacgccagggttttcccagtcacgacgttgtaaaacgacggccagtgaattgtaatacgactcactatagggcgaattgggtaccgggccccccctcgaggtcgatggtgtcgataagcttgatatcg

SEQ ID NO: 66 - DNA, 11444 bp, artificial sequence
  Plasmid pZP34R
cgatgcgtatctgtgggacatgtggtcgttgcgccattatgtaagcagcgtgtactcctctgactgtccatatggtttgctccatctcaccctcatcgttttcattgttcacaggcggccacaaaaaaactgtcttctctccttctctcttcgccttagtctactcggaccagttttagtttagcttggcgccactggataaatgagacctcaggccttgtgatgaggaggtcacttatgaagcatgttaggaggtgcttgtatggatagagaagcacccaaaataataagaataataataaaacagggggcgttgtcatttcatatcgtgttttcaccatcaatacacctccaaacaatgcccttcatgtggccagccccaatattgtcctgtagttcaactctatgcagctcgtatcttattgagcaagtaaaactctgtcagccgatattgcccgacccgcgacaagggtcaacaaggtggtgtaaggccttcgcagaagtcaaaactgtgccaaacaaacatctagagtctctttggtgtttctcgcatatatttwatcggctgtcttacgtatttgcgcctcggtaccggactaatttcggatcatccccaatacgctttttcttcgcagctgtcaacagtgtccatgatctatccacctaaatgggtcatatgaggcgtataatttcgtggtgctgataataattcccatatatttgacacaaaacttccccccctagacatacatctcacaatctcacttcttgtgcttctgtcacacatctcctccagctgacttcaactcacacctctgccccagttggtctacagcggtataaggtttctccgcatagaggtgcaccactcctcccgatacttgtttgtgtgacttgtgggtcacgacatatatatctacacacattgcgccaccctttggttcttccagcacaacaaaaacacgacacgctaaccatggttcgatccgagtacgccgacgttcctcccgtcgacctgcccattcacgatgctgtgctcggaggtgctgccgctttcggctctactcctgccctgatcgacggaaccgacggcaccactctcacctacgagcaggtggaccgatttcacagacgagtcgctgcagcccttgccgagacaggcgttcgaaagggagacgtcttggctctgcactctcccaacactgttgccttcccacttgccttctacgctgccaccagagctggtgcctccgtcaccactgtgcatcctcttgctacagcagaagagtttgccaagcagctgaaggactctgctgcccgatggattgtcaccgtttcccctctcctgtccactgcccgacgagctgccgagcttgctggaggcgtccaggagattctggtttgcgacagcgcacccggtcaccgatcccttgtcgatatgctggcctctacagctcccgaaccttccgtcgccatcgaccctgcagaggacgttgctgccttgccctactcttccggaactaccggtactcccaagggtgtcatgctcacccatcgacagattgccaccaacctggctcaactcgaaccttccatgccctctgctcctggagatcgagttcttgcagtgcttcccttctttcacatctatggtctgactgccctcatgaacgctcctctgcgactcggagccaccgtcgtggttcttccacgattcgacctggagcagtttctcgctgccattcagaaccaccgaatcacttcgctgtacgtcgctcctcccattgtgctggcacttgccaaacatcccttggttgccgactacgatctctcctcgctgagatacatcgtgtcggctgccgcacctctcgatgctcgacttgccgctgcctgttcccagcgactcggactgcctcccgtcggtcaggcttacggcatgaccgagctgtctcctggaacacacgtggttcccttggacgcaatggccgatgctcctcctggcactgtcggtcgactcattgccggaaccgagatgcgaatcgtctccctcaccgatccaggtacagaccttcctgctggagagtctggcgagattctcattcgaggtccccagatcatgaagggctacttgggaagacccgatgccactgctgccatgatcgacgaagaaggctggctgcacacaggtgatgtcggacacgtggatgccgatggctggctgtttgttgtcgaccgagtcaaggagcttatcaagtacaagggattccaggttgctcctgccgagctggaagcccacctgctcactcatccaggtgtcgcagacgctgccgtggttggagcctacgacgatgacggcaacgaggttccccatgccttcgtcgtgcgacaacctgccgctcccggtcttgccgagtccgagatcatgatgtacgttgccgaacgagtcgctccctacaagcgagtgcgacgagttaccttcgtcgatgccgttcccagagctgcctccggcaagattctccgaagacagctgcgagagcctcgataagcggccgcaagtgtggatggggaagtgagtgcccggttctgtgtgcacaattggcaatccaagatggatggattcaacacagggatatagcgagctacgtggtggtgcgaggatatagcaacggatatttatgtttgacacttgagaatgtacgatacaagcactgtccaagtacaatactaaacatactgtacatactcatactcgtacccgggcaacggtttcacttgagtgcagtggctagtgctcttactcgtacagtgtgcaatactgcgtatcatagtctttgatgtatatcgtattcattcatgttagttgcgtacggtgtgtatcgtagaggtagtgacgtgttgtccacagggcgactgtgtccgtgtatatatatattcctcggcccgagcttatttgtgtggggttgaggaaatcaaaccaaatcggtagtcagagaaataaaacaaaaagaaataaaaagaaatagaggacgcacaacgccatcaccgtcggagagacaggagaagggaaaatgggcaaaaatgcccttatcacacccgcccgctttgtgctctcattcggctcccacaagagcctcttgtcctggttccccccccccacattttaacaccccacacgacgttgctgcacgtggaattttcggccgaaaacctgtggggtacttacttttggcactggagagaagcatctgggattttgggaacctaggcagaagatgaggaaaaaaataagaggaaccgttgtgagcttgcttatcagtgtcatatactcccccctccttgcgtttttgcgtcttttccccctatttttcaaattttgcgattttttttctctttttttccgcttttttccgctttttttttggccggcttttatccatttctccaagccgaggatcacatctatgcagcccagtccgttggagcatatctgcggtagagtttcggaacggcgttaagcactgtgtccgggtcggtctggaacgagattgagcgggaaattcgggggaataagaccaccgttggactccccgcaatgaggagatcaagatgtgcttttcagaattctgattggtggcgcgccagctgcattaatgaatcggccaacgcgcggggagaggcggtttgcgtattgggcgctcttccgcttcctcgctcactgactcgctgcgctcggtcgttcggctgcggcgagcggtatcagctcactcaaaggcggtaatacggttatccacagaatcaggggataacgcaggaaagaacatgtgagcaaaaggccagcaaaaggccaggaaccgtaaaaaggccgcgttgctggcgtttttccataggctccgcccccctgacgagcatcacaaaaatcgacgctcaagtcagaggtggcgaaacccgacaggactataaagataccaggcgtttccccctggaagctccctcgtgcgctctcctgttccgaccctgccgcttaccggatacctgtccgcctttctcccttcgggaagcgtggcgctttctcatagctcacgctgtaggtatctcagttcggtgtaggtcgttcgctccaagctgggctgtgtgcacgaaccccccgttcagcccgaccgctgcgccttatccggtaactatcgtcttgagtccaacccggtaagacacgacttatcgccactggcagcagccactggtaacaggattagcagagcgaggtatgtaggcggtgctacagagttcttgaagtggtggcctaactacggctacactagaagaacagtatttggtatctgcgctctgctgaagccagttaccttcggaaaaagagttggtagctcttgatccggcaaacaaaccaccgctggtagcggtggtttttttgtttgcaagcagcagattacgcgcagaaaaaaaggatctcaagaagatcctttgatcttttctacggggtctgacgctcagtggaacgaaaactcacgttaagggattttggtcatgagattatcaaaaaggatcttcacctagatccttttaaattaaaaatgaagttttaaatcaatctaaagtatatatgagtaaacttggtctgacagttaccaatgcttaatcagtgaggcacctatctcagcgatctgtctatttcgttcatccatagttgcctgactccccgtcgtgtagataactacgatacgggagggcttaccatctggccccagtgctgcaatgataccgcgagacccacgctcaccggctccagatttatcagcaataaaccagccagccggaagggccgagcgcagaagtggtcctgcaactttatccgcctccatccagtctattaattgttgccgggaagctagagtaagtagttcgccagttaatagtttgcgcaacgttgttgccattgctacaggcatcgtggtgtcacgctcgtcgtttggtatggcttcattcagctccggttcccaacgatcaaggcgagttacatgatcccccatgttgtgcaaaaaagcggttagctccttcggtcctccgatcgttgtcagaagtaagttggccgcagtgttatcactcatggttatggcagcactgcataattctcttactgtcatgccatccgtaagatgcttttctgtgactggtgagtactcaaccaagtcattctgagaatagtgtatgcggcgaccgagttgctcttgcccggcgtcaatacgggataataccgcgccacatagcagaactttaaaagtgctcatcattggaaaacgttcttcggggcgaaaactctcaaggatcttaccgctgttgagatccagttcgatgtaacccactcgtgcacccaactgatcttcagcatcttttactttcaccagcgtttctgggtgagcaaaaacaggaaggcaaaatgccgcaaaaaagggaataagggcgacacggaaatgttgaatactcatactcttcctttttcaatattattgaagcatttatcagggttattgtctcatgagcggatacatatttgaatgtatttagaaaaataaacaaataggggttccgcgcacatttccccgaaaagtgccacctgatgcggtgtgaaataccgcacagatgcgtaaggagaaaataccgcatcaggaaattgtaagcgttaatattttgttaaaattcgcgttaaatttttgttaaatcagctcattttttaaccaataggccgaaatcggcaaaatcccttataaatcaaaagaatagaccgagatagggttgagtgttgttccagtttggaacaagagtccactattaaagaacgtggactccaacgtcaaagggcgaaaaaccgtctatcagggcgatggcccactacgtgaaccatcaccctaatcaagttttttggggtcgaggtgccgtaaagcactaaatcggaaccctaaagggagcccccgatttagagcttgacggggaaagccggcgaacgtggcgagaaaggaagggaagaaagcgaaaggagcgggcgctagggcgctggcaagtgtagcggtcacgctgcgcgtaaccaccacacccgccgcgcttaatgcgccgctacagggcgcgtccattcgccattcaggctgcgcaactgttgggaagggcgatcggtgcgggcctcttcgctattacgccagctggcgaaagggggatgtgctgcaaggcgattaagttgggtaacgccagggttttcccagtcacgacgttgtaaaacgacggccagtgaattgtaatacgactcactatagggcgaattgggcccgacgtcgcatgcgtcgagatatcgacattgttccatctccagtttaaccccaacttatcgagagtatttgtgagacacgcaataaatgaatttataccaatcaaatccatattctacgctgtctacatatagatactttttgtcatctcttgccctactatttcgtcgatatatgaaggatacgccaaccgaacccatactccacgctacacacgcgccttttcacgcatttctggggaaaatagacacccttggtgtcacctgaagaatatgaaagaagatattcattgtattgagctgtagatctgtgtatttcttgacctcatcaatgacttctgggctctttacctcgaatcatggtggtactgtaccacatctcaacaccttgtagcacacctatgggaaaattgagactatgaatggattcccgtgcccgtattactctactaatttgatcttggaacgcgaaaatacgtttctaggactccaaagaatctcaactcttgtccttactaaatatactacccatagttgatggtttacttgaacagagaggacatgttcacttgacccaaagtttctcgcatctcttggatatttgaacaacggcgtccactgaccgtcagttatccagtcacaaaacccccacattcatacattcccatgtacgtttacaaagttctcaattccatcgtgcaaatcaaaatcacatctattcattcatcatatataaacccatcatgtctactaacactcacaactccatagaaaacatcgactcagaacacacgctccatctattcctcgtccagctcgcaaatgtcgtcatcttaattaagttgcgacacatgtcttgatagtatcttggcttctctctcttgagcttttccataacaagttcttctgcctccaggaagtccatggtgaatgattcttatactcagaaggaaatgcttaacgatttcgggtgtgagttgacaaggagagagagaaaagaagaggaaaggtaattcggggacggtggtcttttatacccttggctaaagtcccaaccacaaagcaaaaaaattttcagtagtctattttgcgtccggcatgggttacccggatggccagacaaagaaactagtacaaagtctgaacaagcgtagattccagactgcagtaccctacgcccttaacggcaagtgtgggaaccgggggaggtttgatatgtggggtgaagggggctctcgccggggttgggcccgctactgggtcaatttggggtcaattggggcaattggggctgttttttgggacacaaatacgccgccaacccggtctctcctgaattctgcagatgggctgcaggaattccgtcgtcgcctgagtcgacatcatttaaataccagttggccacaaacccttgacgatctcgtatgtcccctccgacatactcccggccggctggggtacgttcgatagcgctatcggcatcgacaaggtttgggtccctagccgataccgcactacctgagtcacaatcttcggaggtttagtcttccacatagcacgggcaaaagtgcgtatatatacaagagcgtttgccagccacagattttcactccacacaccacatcacacatacaaccacacacatccacaatggaacccgaaactaagaagaccaagactgactccaagaagattgttcttctcggcggcgacttctgtggccccgaggtgattgccgaggccgtcaaggtgctcaagtctgttgctgaggcctccggcaccgagtttgtgtttgaggaccgactcattggaggagctgccattgagaaggagggcgagcccatcaccgacgctactctcgacatctgccgaaaggctgactctattatgctcggtgctgtcggaggcgctgccaacaccgtatggaccactcccgacggacgaaccgacgtgcgacccgagcagggtctcctcaagctgcgaaaggacctgaacctgtacgccaacctgcgaccctgccagctgctgtcgcccaagctcgccgatctctcccccatccgaaacgttgagggcaccgacttcatcattgtccgagagctcgtcggaggtatctactttggagagcgaaaggaggatgacggatctggcgtcgcttccgacaccgagacctactccgttcctgaggttgagcgaattgcccgaatggccgccttcctggcccttcagcacaacccccctcttcccgtgtggtctcttgacaaggccaacgtgctggcctcctctcgactttggcgaaagactgtcactcgagtcctcaaggacgaattcccccagctcgagctcaaccaccagctgatcgactcggccgccatgatcctcatcaagcagccctccaagatgaatggtatcatcatcaccaccaacatgtttggcgatatcatctccgacgaggcctccgtcatccccggttctctgggtctgctgccctccgcctctctggcttctctgcccgacaccaacgaggcgttcggtctgtacgagccctgtcacggatctgcccccgatctcggcaagcagaaggtcaaccccattgccaccattctgtctgccgccatgatgctcaagttctctcttaacatgaagcccgccggtgacgctgttgaggctgccgtcaaggagtccgtcgaggctggtatcactaccgccgatatcggaggctcttcctccacctccgaggtcggagacttgttgccaacaaggtcaaggagctgctcaagaaggagtaagtcgtttctacgacgcattgatggaaggagcaaactgacgcgcctgcgggttggtctaccggcagggtccgctagtgtataagactctataaaaagggccctgccctgctaatgaaatgatgatttataatttaccggtgtagcaaccttgactagaagaagcagattgggtgtgtttgtagtggaggacagtggtacgttttggaaacagtcttcttgaaagtgtcttgtctacagtatattcactcataacctcaatagccaagggtgtagtcggtttattaaaggaagggagttgtggctgatgtggatagatatctttaagctggcgactgcacccaacgagtgtggtggtagcttgttagatctgtatattcggtaagatatattttgtggggttttagtggtgtttaaacagcaaggacaaggtggccaacagcaaggagtccaaaaagccctctattgacgagatccacgatgttattgctcatgaggtttccgagctcgatgctgggaagaagaagtgatttgtatataagaaataaatgagatatagtaaaggagtgcaagagaatggcaaggtggtcaaattctatattacttgcagtcactggttcctcgttgacatgaatgaagttaccgttggcatagctgatttaatatataactgtccaactaactctcacctagatataacccatgtgtgtgtttccaatcatcaatgcggccgcttagttagtgacggtgggaacagagtggagcacgacagtttcgatggtcagtccaggaccaaagccgaagaggactccccagtccaggccttcaccagtggtggccttctctcccttgagggatttctttcgcatctcgtccagaatgaagagcacacaagcagaggacatgttgccgtactcgctcagcacgtgtcgagtggcttcgagcttcttcttctccaggttgagcttagcctcaactgcgtcgaggatggcaggacctccgggatgagcaatccagaacagagagttccagtcggagataccgagagggtcgaaagcctgggtcaggcacttctcaatgttctcggagatgagagtgggcacattaggccacaggtggaaggtgaggccaacctctcgcaggtttccggcaatggcaccagcagagttggggataaaggtttgggcagcggagacaagctggaagaggggtcgctcgatagagacatcgggatcggatccaacaatcacggcagaggagccatcaccaaacagagcctggccgacgagggagtccagggcatcttcagagggacctcggaaggtcacgacagtgatttcggagcacacaacgaggactcgtgctccagcgttgttctcggccaggtccttggcagttcggagcacggtgccaccagcgtagcagccttggtggtacagcatgactcgtcggacggaggtttcaaggccgagcaggttagcgagcttgtagtcggctccaggcatttccacaccagaggtagtacagaagaccagatgggtgatcttggacttgggctgtccccactctttgagagccttcagggcagcatcccgaccgagtcggggaacctcagcggtgataatctcctgtcggatgttcagagaaggagccatgtaagcgccaatgttgggatgctcttcgagcatctcttcagtcaggtggatgtatcgcttcttaatcatggatttgtcacagatccggttgaacttcttcttgagctcggtcatgtgctcggacttggtcactcggaagtagtaatcggcatagtcagactggtagacacagtggtcaggggtagcagtgccaatggccaggatggtagcgggacccttggctcgctgagcgtttcggaattcctcaacggaggccatggtgaatgattcttatactcagaaggaaatgcttaacgatttcgggtgtgagttgacaaggagagagagaaaagaagaggaaaggtaattcggggacggtggtcttttatacccttggctaaagtcccaaccacaaagcaaaaaaattttcagtagtctattttgcgtccggcatgggttacccggatggccagacaaagaaactagtacaaagtctgaacaagcgtagattccagactgcagtaccctacgcccttaacggcaagtgtgggaaccgggggaggtttgatatgtggggtgaagggggctctcgccggggttgggcccgctactgggtcaatttggggtcaattggggcaattggggctgttttttgggacacaaatacgccgccaacccggtctctcctgaattctgcat

SEQ ID NO: 67 - DNA, 13489 bp, artificial sequence
  Plasmid pYCRTEBI
gatctactatagaggaacaattgccccggagaagacggccaggccgcctagatgacaaattcaacaactcacagctgactttctgccattgccactaggggggggcctttttatatggccaagccaagctctccacgtcggttgggctgcacccaacaataaatgggtagggttgcaccaacaaagggatgggatggggggtagaagatacgaggataacggggctcaatggcacaaataagaacgaatactgccattaagactcgtgatccagcgactgacaccattgcatcatctaagggcctcaaaactacctcggaactgctgcgctgatctggacaccacagaggttccgagcactttaggttgcaccaaatgtcccaccaggtgcaggcagaaaacgctggaacagcgtgtacagtttgtcttaacaaaaagtgagggcgctgaggtcgagcagggtggtgtgacttgttatagcctttagagctgcgaaagcgcgtatggatttggctcatcaggccagattgagggtctgtggacacatgtcatgttagtgtacttcaatcgccccctggatatagccccgacaataggccgtggcctcatttttttgccttccgcacatttccattgctcggtacccacaccttgcttctcctgcacttgccaaccttaatactggtttacattgaccaacatcttacaagcggggggcttgtctagggtatatataaacagtggctctcccaatcggttgccagtctcttttttcctttctttccccacagattcgaaatctaaactacacatcacacaatgcctgttactgacgtccttaagcgaaagtccggtgtcatcgtcggcgacgatgtccgagccgtgagtatccacgacaagatcagtgtcgagacgacgcgttttgtgtaatgacacaatccgaaagtcgctagcaacacacactctctacacaaactaacccagctctccatggctatcttcgctgagagagactccactctcatctactctgatcctctgatgctccttgccatcattgagcagcgtctcgaccgacttctgcctgtcgaatccgagcgagactgcgttggtctcgccatgcgagaaggcgctttggcacccggaaagcgaatcagacctgtccttctcatgctggctgcccacgaccttggctaccgagacgaactctctggacttctcgacttcgcctgtgctgtcgagatggttcacgcagcctccctgatcctggatgacattccctgcatggacgatgccgagcttcgacgtggccgacctaccatccatcgacagttcggtgaacccgtggctatcctcgcagccgttgctctgctttcacgagccttcggagtcattgctctggcagacggcatctcttcccaggccaagactcaggccgtggctgagcttagccactccgtcggtattcagggtctggttcaaggacagtttctcgatctgaccgaaggaggtcaaccacgatccgctgatgccattcagcttaccaaccacttcaagacttctgccctgttttcggctgccatgcagatggctgccatcattgctggtgctcctctggcatcccgagagaagttgcatcgtttcgctcgagacctcggacaagcctttcagctgctcgacgatctgacagacggccagagcgacactggcaaggatgcccatcaggacgtcggaaagtctaccctggtcaacatgttgggttccaaagcagtcgagaagcgactgagagaccacttgcgacgtgccgatcgacatctcgcttctgcctgtgactccggatacgccacccgacactttgtgcaggcttggttcgacaaaaagctcgcaatggtcggttaagcggccgcatgagaagataaatatataaatacattgagatattaaatgcgctagattagagagcctcatactgctcggagagaagccaagacgagtactcaaaggggattacaccatccatatccacagacacaagctggggaaaggttctatatacactttccggaataccgtagtttccgatgttatcaatgggggcagccaggatttcaggcacttcggtgtctcggggtgaaatggcgttcttggcctccatcaagtcgtaccatgtcttcatttgcctgtcaaagtaaaacagaagcagatgaagaatgaacttgaagtgaaggaatttaaatgtaacgaaactgaaatttgaccagatattgtgtccgcggtggagctccagcttttgttccctttagtgagggttaatttcgagcttggcgtaatcatggtcatagctgtttcctgtgtgaaattgttatccgctcacaagcttccacacaacgtacgccaccattctgtctgccgccatgatgctcaagttctctcttaacatgaagcccgccggtgacgctgttgaggctgccgtcaaggagtccgtcgaggctggtatcactaccgccgatatcggaggctcttcctccacctccgaggtcggagacttgttgccaacaaggtcaaggagctgctcaagaaggagtaagtcgtttctacgacgcattgatggaaggagcaaactgacgcgcctgcgggttggtctaccggcagggtccgctagtgtataagactctataaaaagggccctgccctgctaatgaaatgatgatttataatttaccggtgtagcaaccttgactagaagaagcagattgggtgtgtttgtagtggaggacagtggtacgttttggaaacagtcttcttgaaagtgtcttgtctacagtatattcactcataacctcaatagccaagggtgtagtcggtttattaaaggaagggagttgtggctgatgtggatagatatctttaagctggcgactgcacccaacgagtgtggtggtagcttgttactgtatattcggtaagatatattttgtggggttttagtggtgtttggtaggttagtgcttggtatatgagttgtaggcatgacaatttggaaaggggtggactttgggaatattgtgggatttcaataccttagtttgtacagggtaattgttacaaatgatacaaagaactgtatttcttttcatttgttttaattggttgtatatcaagtccgttagacgagctcagtgggcgcgccagctgcattaatgaatcggccaacgcgcggggagaggcggtttgcgtattgggcgctcttccgcttcctcgctcactgactcgctgcgctcggtcgttcggctgcggcgagcggtatcagctcactcaaaggcggtaatacggttatccacagaatcaggggataacgcaggaaagaacatgtgagcaaaaggccagcaaaaggccaggaaccgtaaaaaggccgcgttgctggcgtttttccataggctccgcccccctgacgagcatcacaaaaatcgacgctcaagtcagaggtggcgaaacccgacaggactataaagataccaggcgtttccccctggaagctccctcgtgcgctctcctgttccgaccctgccgcttaccggatacctgtccgcctttctcccttcgggaagcgtggcgctttctcatagctcacgctgtaggtatctcagttcggtgtaggtcgttcgctccaagctgggctgtgtgcacgaaccccccgttcagcccgaccgctgcgccttatccggtaactatcgtcttgagtccaacccggtaagacacgacttatcgccactggcagcagccactggtaacaggattagcagagcgaggtatgtaggcggtgctacagagttcttgaagtggtggcctaactacggctacactagaagaacagtatttggtatctgcgctctgctgaagccagttaccttcggaaaaagagttggtagctcttgatccggcaaacaaaccaccgctggtagcggtggtttttttgtttgcaagcagcagattacgcgcagaaaaaaaggatctcaagaagatcctttgatcttttctacggggtctgacgctcagtggaacgaaaactcacgttaagggattttggtcatgagattatcaaaaaggatcttcacctagatccttttaaattaaaaatgaagttttaaatcaatctaaagtatatatgagtaaacttggtctgacagttaccaatgcttaatcagtgaggcacctatctcagcgatctgtctatttcgttcatccatagttgcctgactccccgtcgtgtagataactacgatacgggagggcttaccatctggccccagtgctgcaatgataccgcgagacccacgctcaccggctccagatttatcagcaataaaccagccagccggaagggccgagcgcagaagtggtcctgcaactttatccgcctccatccagtctattaattgttgccgggaagctagagtaagtagttcgccagttaatagtttgcgcaacgttgttgccattgctacaggcatcgtggtgtcacgctcgtcgtttggtatggcttcattcagctccggttcccaacgatcaaggcgagttacatgatcccccatgttgtgcaaaaaagcggttagctccttcggtcctccgatcgttgtcagaagtaagttggccgcagtgttatcactcatggttatggcagcactgcataattctcttactgtcatgccatccgtaagatgcttttctgtgactggtgagtactcaaccaagtcattctgagaatagtgtatgcggcgaccgagttgctcttgcccggcgtcaatacgggataataccgcgccacatagcagaactttaaaagtgctcatcattggaaaacgttcttcggggcgaaaactctcaaggatcttaccgctgttgagatccagttcgatgtaacccactcgtgcacccaactgatcttcagcatcttttactttcaccagcgtttctgggtgagcaaaaacaggaaggcaaaatgccgcaaaaaagggaataagggcgacacggaaatgttgaatactcatactcttcctttttcaatattattgaagcatttatcagggttattgtctcatgagcggatacatatttgaatgtatttagaaaaataaacaaataggggttccgcgcacatttccccgaaaagtgccacctgatgcggtgtgaaataccgcacagatgcgtaaggagaaaataccgcatcaggaaattgtaagcgttaatattttgttaaaattcgcgttaaatttttgttaaatcagctcattttttaaccaataggccgaaatcggcaaaatcccttataaatcaaaagaatagaccgagatagggttgagtgttgttccagtttggaacaagagtccactattaaagaacgtggactccaacgtcaaagggcgaaaaaccgtctatcagggcgatggcccactacgtgaaccatcaccctaatcaagttttttggggtcgaggtgccgtaaagcactaaatcggaaccctaaagggagcccccgatttagagcttgacggggaaagccggcgaacgtggcgagaaaggaagggaagaaagcgaaaggagcgggcgctagggcgctggcaagtgtagcggtcacgctgcgcgtaaccaccacacccgccgcgcttaatgcgccgctacagggcgcgtccattcgccattcaggctgcgcaactgttgggaagggcgatcggtgcgggcctcttcgctattacgccagctggcgaaagggggatgtgctgcaaggcgattaagttgggtaacgccagggttttcccagtcacgacgttgtaaaacgacggccagtgaattgtaatacgactcactatagggcgaattgggcccgacgtcgcatgctatcggcatcgacaaggtttgggtccctagccgataccgcactacctgagtcacaatcttcggaggtttagtcttccacatagcacgggcaaaagtgcgtatatatacaagagcgtttgccagccacagattttcactccacacaccacatcacacatacaaccacacacatccacaatggaacccgaaactaagaagaccaagactgactccaagaagattgttcttctcggcggcgacttctgtggccccgaggtgattgccgaggccgtcaaggtgctcaagtctgttgctgaggcctccggcaccgagtttgtgtttgaggaccgactcattggaggagctgccattgagaaggagggcgagcccatcaccgacgctactctcgacatctgccgaaaggctgactctattatgctcggtgctgtcggaggcgctgccaacaccgtatggaccactcccgacggacgaaccgacgtgcgacccgagcagggtctcctcaagctgcgaaaggacctgaacctgtacgccaacctgcgaccctgccagctgctgtcgcccaagctcgccgatctctcccccatccgaaacgttgagggcaccgacttcatcattgtccgagagctcgtcggaggtatctactttggagagcgaaaggaggatgacggatctggcgtcgcttccgacaccgagacctactccgttaattaactttggccggaattcctttacctgcaggataacttcgtataatgtatgctatacgaagttatgatctctctcttgagcttttccataacaagttcttctgcctccaggaagtccatgggtggtttgatcatggttttggtgtagtggtagtgcagtggtggtattgtgactggggatgtagttgagaataagtcatacacaagtcagctttcttcgagcctcatataagtataagtagttcaacgtattagcactgtacccagcatctccgtatcgagaaacacaacaacatgccccattggacagatcatgcggatacacaggttgtgcagtatcatacatactcgatcagacaggtcgtctgaccatcatacaagctgaacaagcgctccatacttgcacgctctctatatacacagttaaattacatatccatagtctaacctctaacagttaatcttctggtaagcctcccagccagccttctggtatcgcttggcctcctcaataggatctcggttctggccgtacagacctcggccgacaattatgatatccgttccggtagacatgacatcctcaacagttcggtactgctgtccgagagcgtctcccttgtcgtcaagacccaccccgggggtcagaataagccagtcctcagagtcgcccttaggtcggttctgggcaatgaagccaaccacaaactcggggtcggatcgggcaagctcaatggtctgcttggagtactcgccagtggccagagagcccttgcaagacagctcggccagcatgagcagacctctggccagcttctcgttgggagaggggactaggaactccttgtactgggagttctcgtagtcagagacgtcctccttcttctgttcagagacagtttcctcggcaccagctcgcaggccagcaatgattccggttccgggtacaccgtgggcgttggtgatatcggaccactcggcgattcggtgacaccggtactggtgcttgacagtgttgccaatatctgcgaactttctgtcctcgaacaggaagaaaccgtgcttaagagcaagttccttgagggggagcacagtgccggcgtaggtgaagtcgtcaatgatgtcgatatgggttttgatcatgcacacataaggtccgaccttatcggcaagctcaatgagctccttggtggtggtaacatccagagaagcacacaggttggttttcttggctgccacgagcttgagcactcgagcggcaaaggcggacttgtggacgttagctcgagcttcgtaggagggcattttggtggtgaagaggagactgaaataaatttagtctgcagaactttttatcggaaccttatctggggcagtgaagtatatgttatggtaatagttacgagttagttgaacttatagatagactggactatacggctatcggtccaaattagaaagaacgtcaatggctctctgggcgtcgcctttgccgacaaaaatgtgatcatgatgaaagccagcaatgacgttgcagctgatattgttgtcggccaaccgcgccgaaaacgcagctgtcagacccacagcctccaacgaagaatgtatcgtcaaagtgatccaagcacactcatagttggagtcgtactccaaaggcggcaatgacgagtcagacagatactcgtcgacgcgataacttcgtataatgtatgctatacgaagttatcgtacgatagttagtagacaacaatcgatcgaggaagaggacaagcggctgcttcttaagtttgtgacatcagtatccaaggcaccattgcaaggattcaaggctttgaacccgtcatttgccattcgtaacgctggtagacaggttgatcggttccctacggcctccacctgtgtcaatcttctcaagctgcctgactatcaggacattgatcaacttcggaagaaacttttgtatgccattcgatcacatgctggtttcgatttgtcttagaggaacgcatatacagtaatcatagagaataaacgatattcatttattaaagtagatagttgaggtagaagttgtaaagagtgataaatagcggccgcttaacgaggtcgctgccacaactctgcaggtcgtggaggagatgcagcggcacgggatcggatagcttgggcagctcctgcagccagaagcaggagcttctcctgcttcgaggtagactgtcgtctgtcccaggcagtctcgccagcaccgtaaaccttcactccgattcgtctgtagacttccttggcagttgcaatagcccaggcagatcgcaagggaagacctgcgaggccagcgctggcagaggcatagtagggttcagcctcggagacgagtcttcgtgccaagttggcaagagcaggtcgatgggctctgtcagcgaagtgcagtcgatcgagtccagcttcctcgagccaggactcaggcaggtagcaacgtccaactcgtgcatcctcgacaatgtctcgagcaatgttggtaagctgaaaggccagaccgaggtcacaagctcgatccagcacggcttcgtctcgaactcccatgatctgagccatcatgagaccaacgactccagcaacgtggtaacagtatcgcagagtgtcctggaaggtctcgtatctagcacctcgaacgtccatagcaaagccttcgagatgatcgaaggcgtatgctggagagatgtcgtgagcaatggcaacctcctggaaggcagcgaaggcaggttcgtgcatctgagctccagcgtaggcctgtcgagtctttcgttcgaggttagcaagtcgctgttgaggtgtctgtgcagagggaacctcaccaggaaagccgagttgctgatcgtcgatgacatcgtcacagtgtcgacaccaagcgtagagcatcaggacagaacgtcgagtcttggcgtcaaagagcttggaagcggtagcgaacgacttggatccaacctccatagtctcgacagcatggtgcaggagagtagggttgtccatgggcaggacctgtgttagtacattgtcggggagtcatcaattggttcgacaggttgtcgactgttagtatgagctcaattgggctctggtgggtcgatgacacttgtcatctgtttctgttgggtcatgtttccatcaccttctatggtactcacaattcgtccgattcgcccgaatccgttaataccgactttgatggccatgttgatgtgtgtttaattcaagaatgaatatagagaagagaagaagaaaaaagattcaattgagccggcgatgcagacccttatataaatgttgccttggacagacggagcaagcccgcccaaacctacgttcggtataatatgttaagctttttaacacaaaggtttggcttggggtaacctgatgtggtgcaaaagaccgggcgttggcgagccattgcgcgggcgaatggggccgtgactcgtctcaaattcgagggcgtgcctcaattcgtgcccccgtggctttttcccgccgtttccgccccgtttgcaccactgcagccgcttctttggttcggacaccttgctgcgagctaggtgccttgtgctacttaaaaagtggcctcccaacaccaacatgacatgagtgcgtgggccaagacacgttggcggggtcgcagtcggctcaatggcccggaaaaaacgctgctggagctggttcggacgcagtccgccgcggcgtatggatatccgcaaggttccatagcgccattgccctccgtcggcgtctatcccgcaacctctaaatagagcgggaatataacccaagcttcttttttttcctttaacacgcacacccccaactatcatgttgctgctgctgtttgactctactctgtggaggggtgctcccacccaacccaacctacaggtggatccggcgctgtgattggctgataagtctcctatccggactaattctgaccaatgggacatgcgcgcaggacccaaatgccgcaattacgtaaccccaacgaaatgcctacccctctttggagcccagcggccccaaatccccccaagcagcccggttctaccggcttccatctccaagcacaagcagcccggttctaccggcttccatctccaagcacccctttctccacaccccacaaaaagacccgtgcaggacatcctactgcgtgtttaaacatcgtggttaatgctgctgtgtgctgtgtgtgtgtgttgtttggcgctcattgttgcgttatgcagcgtacaccacaatattggaagcttattagcctttctattttttcgtttgcaaggcttaacaacattgctgtggagagggatggggatatggaggccgctggagggagtcggagaggcgttttggagcggcttggcctggcgcccagctcgcgaaacgcacctaggaccctttggcacgccgaaatgtgccacttttcagtctagtaacgccttacctacgtcattccatgcgtgcatgtttgcgccttttttcccttgcccttgatcgccacacagtacagtgcactgtacagtggaggttttgggggggtcttagatgggagctaaaagcggcctagcggtacactagtgggattgtatggagtggcatggagcctaggtggagcctgacaggacgcacgaccggctagcccgtgacagacgatgggtggctcctgttgtccaccgcgtacaaatgtttgggccaaagtcttgtcagccttgcttgcgaacctaattcccaattttgtcacttcgcacccccattgatcgagccctaacccctgcccatcaggcaatccaattaagctcgcattgtctgccttgtttagtttggctcctgcccgtttcggcgtccacttgcacaaacacaaacaagcattatatataaggctcgtctctccctcccaaccacactcacttttttgcccgtcttcccttgctaacacaaaagtcaagaacacaaacaaccaccccaacccccttacacacaagacatatctacagcaatggccatggctcacaccactgtcatcggagctggctttggtggactggctctcgccattcgactgcaggctgcaggcgttcccacccgacttctggagcagcgagacaagcctggtggcagagcctacgtgtaccaggaccaaggcttcacctttgatgctggacccactgtcattaccgatccctccgccatcgaagagctcttcgctcttgccggcaagtccatgcgagactacgttgagctgcttcccgttacccctttctaccgactctgctgggagactggcgaggtctttaactacgataacgatcaggctcgactggaagccgagattcggaagttcaatcctgccgacgtggctggctatcagcgattcctcgactactctcgagccgtcttcgcagaaggttacctcaagttgggaaccgttccctttctgtcctttcgagacatgcttcgagccgctcctcagctcgcacgtcttcaggcttggcgatctgtctactccaaggtggccagcttcattgaggatgacaagctgagacaagccttctcctttcactcgttgctcgttggtggcaacccattcgctacttcctctatctacaccctgattcatgcattggagcgagaatggggtgtctggtttcctcgaggtggcacaggagctctggttcagggtatgctcaagctgttccaggacttgggtggaaccctggagctcaacgccagagtctctcacatcgaggccaaggaggctgccatttccgcagtgcacttggaggatggtcgagtcttcgaaactcgagctgttgcctccaacgccgacgtggttcatacctatggcgatcttctcggaagacatcccgctgcagccgctcaggccaaaaagctgaagggcaagcgaatgtcgaactccttgtttgtcctctacttcggactgaaccaccatcacgaccagcttgctcatcacaccgtctgcttcggtcctcgataccgtgagctcattgacgaaatcttcaaccgagatggacttgccgaagacttctctctctaccttcatgctccctgtgtgactgatccctcgcttgcacctcccggatgtggcagctactatgtcctggctcccgttcctcaccttggtacagccgatctcgactggaacgtcgagggtcctcgactgagagaccgaatctttgcctatctcgaagagcactacatgcctggactgcgatctcaactggttactcatcgaatcttcactcccttcgactttcgagatcagctcaatgcctaccaaggttccgcattctcggtggagcccatcttgagacagtctgcttggtttcgacctcacaaccgagactcgcacattcggaatctctatctggtcggtgccggaacccatcccggtgctggcattcctggagtgatcggttctgccaaggctactgcctccctgatgctcgaggatctgcacgcctaagcggccgcattgatgattggaaacacacacatgggttatatctaggtgagagttagttggacagttatatattaaatcagctatgccaacggtaacttcattcatgtcaacgaggaaccagtgactgcaagtaatatagaatttgaccaccttgccattctcttgcactcctttactatatctcatttatttcttatatacaaatcacttcttcttcccagcatcgagctcggaaacctcatgagcaataacatcgtggatctcgtcaatagagggctttttggactccttgctgttggccaccttgtccttgctgtttaaacaccactaaaaccccacaaaatatatcttaccgaatataca

SEQ ID NO: 68 - DNA, 8982 bp, Artificial Sequence
  Plasmid pY79
ggtggagctccagcttttgttccctttagtgagggttaatttcgagcttggcgtaatcatggtcatagctgtttcctgtgtgaaattgttatccgctcacaattccacacaacgtacgagccggaagcataaagtgtaaagcctggggtgcctaatgagtgagctaactcacattaattgcgttgcgctcactgcccgctttccagtcgggaaacctgtcgtgccagctgcattaatgaatcggccaacgcgcggggagaggcggtttgcgtattgggcgctcttccgcttcctcgctcactgactcgctgcgctcggtcgttcggctgcggcgagcggtatcagctcactcaaaggcggtaatacggttatccacagaatcaggggataacgcaggaaagaacatgtgagcaaaaggccagcaaaaggccaggaaccgtaaaaaggccgcgttgctggcgtttttccataggctccgcccccctgacgagcatcacaaaaatcgacgctcaagtcagaggtggcgaaacccgacaggactataaagataccaggcgtttccccctggaagctccctcgtgcgctctcctgttccgaccctgccgcttaccggatacctgtccgcctttctcccttcgggaagcgtggcgctttctcatagctcacgctgtaggtatctcagttcggtgtaggtcgttcgctccaagctgggctgtgtgcacgaaccccccgttcagcccgaccgctgcgccttatccggtaactatcgtcttgagtccaacccggtaagacacgacttatcgccactggcagcagccactggtaacaggattagcagagcgaggtatgtaggcggtgctacagagttcttgaagtggtggcctaactacggctacactagaaggacagtatttggtatctgcgctctgctgaagccagttaccttcggaaaaagagttggtagctcttgatccggcaaacaaaccaccgctggtagcggtggtttttttgtttgcaagcagcagattacgcgcagaaaaaaaggatctcaagaagatcctttgatcttttctacggggtctgacgctcagtggaacgaaaactcacgttaagggattttggtcatgagattatcaaaaaggatcttcacctagatccttttaaattaaaaatgaagttttaaatcaatctaaagtatatatgagtaaacttggtctgacagttaccaatgcttaatcagtgaggcacctatctcagcgatctgtctatttcgttcatccatagttgcctgactccccgtcgtgtagataactacgatacgggagggcttaccatctggccccagtgctgcaatgataccgcgagacccacgctcaccggctccagatttatcagcaataaaccagccagccggaagggccgagcgcagaagtggtcctgcaactttatccgcctccatccagtctattaattgttgccgggaagctagagtaagtagttcgccagttaatagtttgcgcaacgttgttgccattgctacaggcatcgtggtgtcacgctcgtcgtttggtatggcttcattcagctccggttcccaacgatcaaggcgagttacatgatcccccatgttgtgcaaaaaagcggttagctccttcggtcctccgatcgttgtcagaagtaagttggccgcagtgttatcactcatggttatggcagcactgcataattctcttactgtcatgccatccgtaagatgcttttctgtgactggtgagtactcaaccaagtcattctgagaatagtgtatgcggcgaccgagttgctcttgcccggcgtcaatacgggataataccgcgccacatagcagaactttaaaagtgctcatcattggaaaacgttcttcggggcgaaaactctcaaggatcttaccgctgttgagatccagttcgatgtaacccactcgtgcacccaactgatcttcagcatcttttactttcaccagcgtttctgggtgagcaaaaacaggaaggcaaaatgccgcaaaaaagggaataagggcgacacggaaatgttgaatactcatactcttcctttttcaatattattgaagcatttatcagggttattgtctcatgagcggatacatatttgaatgtatttagaaaaataaacaaataggggttccgcgcacatttccccgaaaagtgccacctgacgcgccctgtagcggcgcattaagcgcggcgggtgtggtggttacgcgcagcgtgaccgctacacttgccagcgccctagcgcccgctcctttcgctttcttcccttcctttctcgccacgttcgccggctttccccgtcaagctctaaatcgggggctccctttagggttccgatttagtgctttacggcacctcgaccccaaaaaacttgattagggtgatggttcacgtagtgggccatcgccctgatagacggtttttcgccctttgacgttggagtccacgttctttaatagtggactcttgttccaaactggaacaacactcaaccctatctcggtctattcttttgatttataagggattttgccgatttcggcctattggttaaaaaatgagctgatttaacaaaaatttaacgcgaattttaacaaaatattaacgcttacaatttccattcgccattcaggctgcgcaactgttgggaagggcgatcggtgcgggcctcttcgctattacgccagctggcgaaagggggatgtgctgcaaggcgattaagttgggtaacgccagggttttcccagtcacgacgttgtaaaacgacggccagtgaattgtaatacgactcactatagggcgaattgggtaccgggccccccctcgaggtcgatggtgtcgataagcttgatatcgaattcatgtcacacaaaccgatcttcgcctcaaggaaacctaattctacatccgagagactgccgagatccagtctacactgattaattttcgggccaataatttaaaaaaatcgtgttatataatattatatgtattatatatatacatcatgatgatactgacagtcatgtcccattgctaaatagacagactccatctgccgcctccaactgatgttctcaatatttaaggggtcatctcgcattgtttaataataaacagactccatctaccgcctccaaatgatgttctcaaaatatattgtatgaacttatttttattacttagtattattagacaacttacttgctttatgaaaaacacttcctatttaggaaacaatttataatggcagttcgttcatttaacaatttatgtagaataaatgttataaatgcgtatgggaaatcttaaatatggatagcataaatgatatctgcattgcctaattcgaaatcaacagcaacgaaaaaaatcccttgtacaacataaatagtcatcgagaaatatcaactatcaaagaacagctattcacacgttactattgagattattattggacgagaatcacacactcaactgtctttctctcttctagaaatacaggtacaagtatgtactattctcattgttcatacttctagtcatttcatcccacatattccttggatttctctccaatgaatgacattctatcttgcaaattcaacaattataataagatataccaaagtagcggtatagtggcaatcaaaaagcttctctggtgtgcttctcgtatttatttttattctaatgatccattaaaggtatatatttatttcttgttatataatccttttgtttattacatgggctggatacataaaggtattttgatttaattttttgcttaaattcaatcccccctcgttcagtgtcaactgtaatggtaggaaattaccatacttttgaagaagcaaaaaaaatgaaagaaaaaaaaaatcgtatttccaggttagacgttccgcagaatctagaatgcggtatgcggtacattgttcttcgaacgtaaaagttgcgctccctgagatattgtacatttttgcttttacaagtacaagtacatcgtacaactatgtactactgttgatgcatccacaacagtttgttttgtttttttttgttttttttttttctaatgattcattaccgctatgtatacctacttgtacttgtagtaagccgggttattggcgttcaattaatcatagacttatgaatctgcacggtgtgcgctgcgagttacttttagcttatgcatgctacttgggtgtaatattgggatctgttcggaaatcaacggatgctcaaccgatttcgacagtaattaattaattccctagtcccagtgtacacccgccgatatcgcttaccctgcagccggattaaggttggcaatttttcacgtccttgtctccgcaattactcaccgggtggtttataagattgcaagcgtcttgatttgtctctgtatactaacatgcaatcgcgactcgcccgacgggccactaacctggccagaatctccagatccaagtattctcttggtctgcgatatgtttccaacacaaaagcccctgctgcccagccggcaactgctgagtgagtattccttgccataaacgacccagaaccactgtatagtgtttggaagcactagtcagaagaccagcgaaaacaggtggaaaaaactgagacgaaaagcaacgaccagaaatgtaatgtgtggaaaagcgacacacacagagcagataaagaggtgacaaataacgacaaatgaaatatcagtatcttcccacaatcactacctctcagctgtctgaaggtgcggctgatatatccatcccacgtctaacgtatggagtgtgatagaatatgacgacacaagcatgagaactcgctctctatccaaccaccgaaacactgtcactacagccgttcttgttgctccattcgcttttgtgattccatgccttctctggtgactgacaacattccttccttttctccagccctgttgttatctgctcatgacctacggccactctctatcgcatactaacatagacgatcccagcccgctccccacttccagggcaccgttggcaagcctcctatcctcaagaaggctgaggctgccaacgctgacatggacgagtccttcatcggaatgtctggaggagagatcttccacgagatgatgctgcgacacaacgtcgacactgtcttcggttaccccggtggagccattctccccgtctttgacgccattcacaactctgagtacttcaactttgtgctccctcgacacgagcagggtgccggccacatggccgagggctacgctcgagcctctggtaagcccggtgtcgttctcgtcacctctggccccggtgccaccaacgtcatcacccccatgcaggacgctctttccgatggtacccccatggttgtcttcaccggtcaggtcctgacctccgttatcggcactgacgccttccaggaggccgatgttgtcggcatctcccgatcttgcaccaagtggaacgtcatggtcaagaacgttgctgagctcccccgacgaatcaacgaggcctttgagattgctacttccggccgacccggtcccgttctcgtcgatctgcccaaggatgttactgctgccatcctgcgagagcccatccccaccaagtccaccattccctcgcattctctgaccaacctcacctctgccgccgccaccgagttccagaagcaggctatccagcgagccgccaacctcatcaaccagtccaagaagcccgtcctttacgtcggacagggtatccttggctccgaggagggtcctaagctgcttaaggagctggctgagaaggccgagattcccgtcaccactactctgcagggtcttggtgcctttgacgagcgagaccccaagtctctgcacatgctcggtatgcacggttccggctacgccaacatggccatgcagaacgctgactgtatcattgctctcggcgcccgatttgatgaccgagttaccggctccatccccaagtttgcccccgaggctcgagccgctgcccttgagggtcgaggtggtattgttcactttgagatccaggccaagaacatcaacaaggttgttcaggccaccgaagccgttgagggagacgttaccgagtctgtccgacagctcatccccctcatcaacaaggtctctgccgctgagcgagctccctggactgagactatccagtcctggaagcagcagttccccttcctcttcgaggctgaaggtgaggatggtgttatcaagccccagtccgtcattgctctgctctctgacctgacagagaacaacaaggacaagaccatcatcaccaccggtgttggtcagcatcagatgtggactgcccagcatttccgatggcgacaccctcgaaccatgatcacttctggtggtcttggaactatgggttacggcctgcccgccgctatcggcgccaaggttgcccgacctgactgcgacgtcattgacatcgatggtgacgcttctttcaacatgactctgaccgagctgtccaccgccgttcagttcaacattggcgtcaaggctattgtcctcaacaacgaggaacagggtatggtcacccagctgcagtctctcttctacgagaaccgatactgccacactcatcagaagaaccccgacttcatgaagctggccgagtccatgggcatgaagggtatccgaatcactcacattgaccagctggaggccggtctcaaggagatgctcgcatacaagggccctgtgctcgttgaggttgttgtcgacaagaagatccccgttcttcccatggttcccgctggtaaggctttgcatgagttccttgtctacgacgctgacgccgaggctgcttctcgacccgatcgactgaagaatgcccccgcccctcacgtccaccagaccacctttgagaactaagtggaaaggaacacaagcaatccgaaccaaaaataattggggtcccgtgcccacagagtctagtgcagacctaaaatgaccacagtaaattatagctgttattaaacatgagattttgaccaacaagagcgtaggaatgttattagctactacttgtacatacacagcatttgttttaaataatgttgcctccaggggcagtgagatcaggacccagatccgtggccagctctctgacttcagaccgcttgtacttaagcagctcgcaacactgttgtcgaggattgaacttgccatattcgattttgtggtcatgaatccagcacacctcgtcgactcaggcgacgacggaattcctgcagcccatctgcagaattcaggagagaccgggttggcggcgtatttgtgtcccaaaaaacagccccaattgccccaattgaccccaaattgacccagtagcgggcccaaccccggcgagagcccccttcaccccacatatcaaacctcccccggttcccacacttgccgttaagggcgtagggtactgcagtctggaatctacgcttgttcagactttgtactagtttctttgtctggccatccgggtaacccatgccggacgcaaaatagactactgaaaatttttttgctttgtggttgggactttagccaagggtataaaagaccaccgtccccgaattacctttcctcttcttttctctctctccttgtcaactcacacccgaaatcgttaagcatttccttctgagtataagaatcattcaccatgtccaatttactgaccgtacaccaaaatttgcctgcattaccggtcgatgcaacgagtgatgaggttcgcaagaacctgatggacatgttcagggatcgccaggcgttttctgagcatacctggaaaatgcttctgtccgtttgccggtcgtgggcggcatggtgcaagttgaataaccggaaatggtttcccgcagaacctgaagatgttcgcgattatcttctatatcttcaggcgcgcggtctggcagtaaaaactatccagcaacatttgggccagctaaacatgcttcatcgtcggtccgggctgccacgaccaagtgacagcaatgctgtttcactggttatgcggcggatccgaaaagaaaacgttgatgccggtgaacgtgcaaaacaggctctagcgttcgaacgcactgatttcgaccaggttcgttcactcatggaaaatagcgatcgctgccaggatatacgtaatctggcatttctggggattgcttataacaccctgttacgtatagccgaaattgccaggatcagggttaaagatatctcacgtactgacggtgggagaatgttaatccatattggcagaacgaaaacgctggttagcaccgcaggtgtagagaaggcacttagcctgggggtaactaaactggtcgagcgatggatttccgtctctggtgtagctgatgatccgaataactacctgttttgccgggtcagaaaaaatggtgttgccgcgccatctgccaccagccagctatcaactcgcgccctggaagggatttttgaagcaactcatcgattgatttacggcgctaaggatgactctggtcagagatacctggcctggtctggacacagtgcccgtgtcggagccgcgcgagatatggcccgcgctggagtttcaataccggagatcatgcaagctggtggctggaccaatgtaaatattgtcatgaactatatccgtaacctggatagtgaaacaggggcaatggtgcgcctgctggaagatggcgattaaggccgccaccgcggcccgagattccggcctcttcggccgccaagcgacccgggtggacgtctagaggtacctagcaattaacagatagtttgccggtgataattctcttaacctcccacactcctttgacataacgatttatgtaacgaaactgaaatttgaccagatattgtgtccgc

SEQ ID NO: 69 - DNA, 14256 bp, artificial sequence
  Plasmid pZKLS555
cgatgagcctaaaatgaacccgagtatatctcataaaattctcggtgagaggtctgtgactgtcagtacaaggtgccttcattatgccctcaaccttaccatacctcactgaatgtagtgtacctctaaaaatgaaatacagtgccaaaagccaaggcactgagctcgtctaacggacttgatatacaaccaattaaaacaaatgaaaagaaatacagttctttgtatcatttgtaacaattaccctgtacaaactaaggtattgaaatcccacaatattcccaaagtccacccctttccaaattgtcatgcctacaactcatataccaagcactaacctaccgtttaaacaagctaccaccacactcgttgggtgcagtcgccagcttaaagatatctatccacatcagccacaactcccttcctttaataaaccgactacacccttggctattgaggttatgagtgaatatactgtagacaagacactttcaagaagactgtttccaaaacgtaccactgtcctccactacaaacacacccaatctgcttcttctagtcaaggttgctacaccggtaaattataaatcatcatttcattagcagggcagggccctttttatagagtcttatacactagcggaccctgccggtagaccaacccgcaggcgcgtcagtttgctccttccatcaatgcgtcgtagaaacgacttactccttcttgagcagctccttgaccttgttggcaacaagtctccgacctcggaggtggaggaagagcctccgatatcggcggtagtgataccagcctcgacggactccttgacggcagcctcaacagcgtcaccggcgggcttcatgttaagagagaacttgagcatcatggcggcagacagaatggtggcaatggggttgaccttctgcttgccgagatcgggggcagatccgtgacagggctcgtacagaccgaacgcctcgttggtgtcgggcagagaagccagagaggcggagggcagcagacccagagaaccggggatgacggaggcctcgtcggagatgatatcgccaaacatgttggtggtgatgatgataccattcatcttggagggctgcttgatgaggatcatggcggccgagtcgatcagctggtggttgagctcgagctgggggaattcgtccttgaggactcgagtgacagtctttcgccaaagtcgagaggaggccagcacgttggccttgtcaagagaccacacgggaagaggggggttgtgctgaagggccaggaaggcggccattcgggcaattcgctcaacctcaggaacggagtaggtctcggtgtcggaagcgacgccagatccgtcatcctcctttcgctctccaaagtagatacctccgacgagctctcggacaatgatgaagtcggtgccctcaacgtttcggatgggggagagatcggcgagcttgggcgacagcagctggcagggtcgcaggttggcgtacaggttcaggtcctttcgcagcttgaggagaccctgctcgggtcgcacgtcggttcgtccgtcgggagtggtccatacggtgttggcagcgcctccgacagcaccgagcataatagagtcagcctttcggcagatgtcgagagtagcgtcggtgatgggctcgccctccttctcaatggcagctcctccaatgagtcggtcctcaaacacaaactcggtgccggaggcctcagcaacagacttgagcaccttgacggcctcggcaatcacctcggggccacagaagtcgccgccgagaagaacaatcttcttggagtcagtcttggtcttcttagtttcgggttccattgtggatgtgtgtggttgtatgtgtgatgtggtgtgtggagtgaaaatctgtggctggcaaacgctcttgtatatatacgcacttttgcccgtgctatgtggaagactaaacctccgaagattgtgactcaggtagtgcggtatcggctagggacccaaaccttgtcgatgccgatagcgctatcgaacgtaccccagccggccgggagtatgtcggaggggacatacgagatcgtcaagggtttgtggccaactggtaaataaatgatgactcaggcgacgacggaattcgacagcaactactcctttcaccaaccatgtgcattttagctcgaataacattcacaggcttggtgatctacatccatggtgtctggccgattaccgtggtgttttggcagtaacgagaatattgagtgaactcttcccatcaccaataaagactcatactacaatcacgagcgcttcagctgccactatagtgttggtgacacaatacccctcgatgctgggcattactgtagcaagagatattcatttcatggcgcattttccagtctacctgactttttagtgccgatttcttctccacattttacgctcagtgtgaaaagttggagtcgacttgcgccattatgtaagcagcgtgtactcctctgactgtccatatggtttgctccatctcaccctcatcgttttcattgttcacaggcggccacaaaaaaactgtcttctctccttctctcttcgccttagtctactcggaccagttttagtttagcttggcgccactggataaatgagacctcaggccttgtgatgaggaggtcacttatgaagcatgttaggaggtgcttgtatggatagagaagcacccaaaataataagaataataataaaacagggggcgttgtcatttcatatcgtgttttcaccatcaatacacctccaaacaatgcccttcatgtggccagccccaatattgtcctgtagttcaactctatgcagctcgtatcttattgagcaagtaaaactctgtcagccgatattgcccgacccgcgacaagggtcaacaaggtggtgtaaggccttcgcagaagtcaaaactgtgccaaacaaacatctagagtctctttggtgtttctcgcatatatttwatcggctgtcttacgtatttgcgcctcggtaccggactaatttcggatcatccccaatacgctttttcttcgcagctgtcaacagtgtccatgatctatccacctaaatgggtcatatgaggcgtataatttcgtggtgctgataataattcccatatatttgacacaaaacttccccccctagacatacatctcacaatctcacttcttgtgcttctgtcacacatctcctccagctgacttcaactcacacctctgccccagttggtctacagcggtataaggtttctccgcatagaggtgcaccactcctcccgatacttgtttgtgtgacttgtgggtcacgacatatatatctacacacattgcgccaccctttggttcttccagcacaacaaaaacacgacacgctaaccatgggaacggaccaaggaaaaaccttcacctgggaagagctggcggcccataacaccaaggacgacctactcttggccatccgcggcagggtgtacgatgtcacaaagttcttgagccgccatcctggtggagtggacactctcctgctcggagctggccgagatgttactccggtctttgagatgtatcacgcgtttggggctgcagatgccattatgaagaagtactatgtcggtacactggtctcgaatgagctgcccatcttcccggagccaacggtgttccacaaaaccatcaagacgagagtcgagggctactttacggatcggaacattgatcccaagaatagaccagagatctggggacgatacgctcttatctttggatccttgatcgcttcctactacgcgcagctctttgtgcctttcgttgtcgaacgcacatggcttcaggtggtgtttgcaatcatcatgggatttgcgtgcgcacaagtcggactcaaccctcttcatgatgcgtctcacttttcagtgacccacaaccccactgtctggaagattctgggagccacgcacgactttttcaacggagcatcgtacctggtgtggatgtaccaacatatgctcggccatcacccctacaccaacattgctggagcagatcccgacgtgtcgacgtctgagcccgatgttcgtcgtatcaagcccaaccaaaagtggtttgtcaaccacatcaaccagcacatgtttgttcctttcctgtacggactgctggcgttcaaggtgcgcattcaggacatcaacattttgtactttgtcaagaccaatgacgctattcgtgtcaatcccatctcgacatggcacactgtgatgttctggggcggcaaggctttctttgtctggtatcgcctgattgttcccctgcagtatctgcccctgggcaaggtgctgctcttgttcacggtcgcggacatggtgtcgtcttactggctggcgctgaccttccaggcgaaccacgttgttgaggaagttcagtggccgttgcctgacgagaacgggatcatccaaaaggactgggcagctatgcaggtcgagactacgcaggattacgcacacgattcgcacctctggaccagcatcactggcagcttgaactaccaggctgtgcaccatctgttccccaacgtgtcgcagcaccattatcccgatattctggccatcatcaagaacacctgcagcgagtacaaggttccataccttgtcaaggatacgttttggcaagcatttgcttcacatttggagcacttgcgtgttcttggactccgtcccaaggaagagtaggcggccgcaagtgtggatggggaagtgagtgcccggttctgtgtgcacaattggcaatccaagatggatggattcaacacagggatatagcgagctacgtggtggtgcgaggatatagcaacggatatttatgtttgacacttgagaatgtacgatacaagcactgtccaagtacaatactaaacatactgtacatactcatactcgtacccgggcaacggtttcacttgagtgcagtggctagtgctcttactcgtacagtgtgcaatactgcgtatcatagtctttgatgtatatcgtattcattcatgttagttgcgtacgttatagttggagcaagggagaaatgtagagtgtgaaagactcactatggtccgggcttatctcgaccaatagccaaagtctggagtttctgagagaaaaaggcaagatacgtatgtaacaaagcgacgcatggtacaataataccggaggcatgtatcatagagagttagtggttcgatgatggcactggtgcctggtatgactttatacggctgactacatatttgtcctcagacatacaattacagtcaagcacttacccttggacatctgtaggtaccccccggccaagacgatctcagcgtgtcgtatgtcggattggcgtagctccctcgctcgtcaattggctcccatctactttcttctgcttggctacacccagcatgtctgctatggctcgttttcgtgccttatctatcctcccagtattaccaactctaaatgacatgatgtgattgggtctacactttcatatcagagataaggagtagcacagttgcataaaaagcccaactctaatcagcttcttcctttcttgtaattagtacaaaggtgattagcgaaatctggaagcttagttggccctaaaaaaatcaaaaaaagcaaaaaacgaaaaacgaaaaaccacagttttgagaacagggaggtaacgaaggatcgtatatatatatatatatatatatacccacggatcccgagaccggcctttgattcttccctacaaccaaccattctcaccaccctaattcacaaccatggtcgctggcaagtccggagctgcagcccacgtgacccactcttccactctccctcgagagtaccacggtgctaccaacgactcccgatctgaggctgccgatgtcaccgtctcgtctatcgacgccgagaaggagatgattatcaacggacgagtgtacgacgtctcctcgttcgtgaagcgacaccctggtggctccgtcatcaagttccagctcggagcagatgcttctgacgcttacaacaacttccacgtccgatcgaagaaggctgacaagatgctgtactctcttccctcccgacctgccgaggctggctatgcacaggacgacatctctagagactttgagaagctgcgactggaactgaaagaggaaggttacttcgagcccaatctggtgcacgtgtcctaccgatgtgtcgaggtgcttgccatgtactgggctggcgtccagctgatctggtccggatactggttcctcggtgccatcgttgctggaattgctcaaggtcgatgcggatggctccagcatgaaggcggacactactcgctcactggcaacatcaagattgaccgacatctccagatggccatctatggactgggctgtggtatgtctggctgctactggagaaaccagcacaacaaacatcacgccactcctcagaagctcggaaccgatcccgacctgcagaccatgcctctcgttgccttccacaagattgtcggagccaaggcacgaggcaagggtaaagcctggcttgcttggcaagctcccctcttctttggaggcatcatttgctccctggtctctttcggctggcagttcgttctccaccccaatcatgcactgcgagtgcacaaccatctcgaactggcctacatgggtctccgatacgttctctggcaccttgcctttggccatctgggactcctgtcctctcttcgactgtatgccttctacgtggctgtcggtggcacctacatcttcaccaacttcgccgtctcccatactcacaaggatgtcgttcctcccaccaagcacatttcgtgggctctgtactctgccaaccacactaccaactgttccgactctccctttgtcaactggtggatggcctacctcaacttccagatcgagcaccatctgttcccctccatgcctcagtacaaccaccccaagattgctcctcgagtgcgagcactcttcgagaagcacggagtcgagtacgacgtccgaccctatctggaatgctttcgagtgacctacgtcaacctccttgctgttggcaaccctgagcactcctaccacgagcatactcactaagcggccgcatgagaagataaatatataaatacattgagatattaaatgcgctagattagagagcctcatactgctcggagagaagccaagacgagtactcaaaggggattacaccatccatatccacagacacaagctggggaaaggttctatatacactttccggaataccgtagtttccgatgttatcaatgggggcagccaggatttcaggcacttcggtgtctcggggtgaaatggcgttcttggcctccatcaagtcgtaccatgtcttcatttgcctgtcaaagtaaaacagaagcagatgaagaatgaacttgaagtgaaggaatttaaatgtaacgaaactgaaatttgaccagatattgtgtccgcggtggagctccagcttttgttccctttagtgagggttaatttcgagcttggcgtaatcatggtcatagctgtttcctgtgtgaaattgttatccgctcacaagcttgacaatggatggtgtgtcgtatcaggctggggaacaattgtgcttaagtatgctgcagttgagtaagagtcatcgctccaccaaaataaagtttgccattagggttggagagagagatggtggctggaagaattaaatgacatcaagctgaggattgtgggtgtgcaataacacatgttaggggtgacctgtggctcgaaatctgataattattttgtaactttatgattattcttagattttttaatattcctctatataacacataagtagctgtcgtctagttgttcatagcctgactcctgcaatagattagtgcagagtgattttgtgcaattgagagccacggttgagtcaagtgactttgtgtgtgaagtcatcttacgtttcaagtctcacaggttactcaattggttggttgtctgccctttacagatatttacagtacctgagcgtaaagtcgttcatccacggaatgactgttcctgtcacgcagtcatgatcatggatgtggctggtcaggaaccattttggataggagacttagggattggactattattgaaaaaactgagccgaatatgatatagttctatttgaatgcagaacttctgatggtcaattcacttatttcaggcatatcggtcatggtggcagctgccacgatgttatctcgttggaaacctcggcgcgccagctgcattaatgaatcggccaacgcgcggggagaggcggtttgcgtattgggcgctcttccgcttcctcgctcactgactcgctgcgctcggtcgttcggctgcggcgagcggtatcagctcactcaaaggcggtaatacggttatccacagaatcaggggataacgcaggaaagaacatgtgagcaaaaggccagcaaaaggccaggaaccgtaaaaaggccgcgttgctggcgtttttccataggctccgcccccctgacgagcatcacaaaaatcgacgctcaagtcagaggtggcgaaacccgacaggactataaagataccaggcgtttccccctggaagctccctcgtgcgctctcctgttccgaccctgccgcttaccggatacctgtccgcctttctcccttcgggaagcgtggcgctttctcatagctcacgctgtaggtatctcagttcggtgtaggtcgttcgctccaagctgggctgtgtgcacgaaccccccgttcagcccgaccgctgcgccttatccggtaactatcgtcttgagtccaacccggtaagacacgacttatcgccactggcagcagccactggtaacaggattagcagagcgaggtatgtaggcggtgctacagagttcttgaagtggtggcctaactacggctacactagaagaacagtatttggtatctgcgctctgctgaagccagttaccttcggaaaaagagttggtagctcttgatccggcaaacaaaccaccgctggtagcggtggtttttttgtttgcaagcagcagattacgcgcagaaaaaaaggatctcaagaagatcctttgatcttttctacggggtctgacgctcagtggaacgaaaactcacgttaagggattttggtcatgagattatcaaaaaggatcttcacctagatccttttaaattaaaaatgaagttttaaatcaatctaaagtatatatgagtaaacttggtctgacagttaccaatgcttaatcagtgaggcacctatctcagcgatctgtctatttcgttcatccatagttgcctgactccccgtcgtgtagataactacgatacgggagggcttaccatctggccccagtgctgcaatgataccgcgagacccacgctcaccggctccagatttatcagcaataaaccagccagccggaagggccgagcgcagaagtggtcctgcaactttatccgcctccatccagtctattaattgttgccgggaagctagagtaagtagttcgccagttaatagtttgcgcaacgttgttgccattgctacaggcatcgtggtgtcacgctcgtcgtttggtatggcttcattcagctccggttcccaacgatcaaggcgagttacatgatcccccatgttgtgcaaaaaagcggttagctccttcggtcctccgatcgttgtcagaagtaagttggccgcagtgttatcactcatggttatggcagcactgcataattctcttactgtcatgccatccgtaagatgcttttctgtgactggtgagtactcaaccaagtcattctgagaatagtgtatgcggcgaccgagttgctcttgcccggcgtcaatacgggataataccgcgccacatagcagaactttaaaagtgctcatcattggaaaacgttcttcggggcgaaaactctcaaggatcttaccgctgttgagatccagttcgatgtaacccactcgtgcacccaactgatcttcagcatcttttactttcaccagcgtttctgggtgagcaaaaacaggaaggcaaaatgccgcaaaaaagggaataagggcgacacggaaatgttgaatactcatactcttcctttttcaatattattgaagcatttatcagggttattgtctcatgagcggatacatatttgaatgtatttagaaaaataaacaaataggggttccgcgcacatttccccgaaaagtgccacctgatgcggtgtgaaataccgcacagatgcgtaaggagaaaataccgcatcaggaaattgtaagcgttaatattttgttaaaattcgcgttaaatttttgttaaatcagctcattttttaaccaataggccgaaatcggcaaaatcccttataaatcaaaagaatagaccgagatagggttgagtgttgttccagtttggaacaagagtccactattaaagaacgtggactccaacgtcaaagggcgaaaaaccgtctatcagggcgatggcccactacgtgaaccatcaccctaatcaagttttttggggtcgaggtgccgtaaagcactaaatcggaaccctaaagggagcccccgatttagagcttgacggggaaagccggcgaacgtggcgagaaaggaagggaagaaagcgaaaggagcgggcgctagggcgctggcaagtgtagcggtcacgctgcgcgtaaccaccacacccgccgcgcttaatgcgccgctacagggcgcgtccattcgccattcaggctgcgcaactgttgggaagggcgatcggtgcgggcctcttcgctattacgccagctggcgaaagggggatgtgctgcaaggcgattaagttgggtaacgccagggttttcccagtcacgacgttgtaaaacgacggccagtgaattgtaatacgactcactatagggcgaattgggcccgacgtcgcatgcattccatagccacacctttgcctatggcttcacaaccgaaggcaattcgagaggtcgcgcttatggaatcgactcgtataaagctgaagggaaagggagacgttccgagcgctcagatgcaatagtcgtccagctaatgtggattcaaaaacaaccccaacagtaatcttgaaaatttgaacggatcaatctgaacactcttgctccaggtcattcttctaacgcacatccccagagtctagagggagttgtgttgtgaacatcctaataaacaatgcaatggattcgggatatcttctgtctcgccccctactcgatgtcgagtaaaccgatcaccaactaacaatactcctccgcgttctgccattgactctcaaacagacatcgctatcaacggaacagcatattttagcttcttaggacaataaatattgataatgccggctctccctcggtatattaagcaatccattcatacactcattcatcaggttaattttatatatataatttgtctattcaaacaccgtaaattactggtaccatcatctcctccttttcaaatacacgtctatttgcattaatgaaattactcgccaattcgcagaacgtgtttgtcgaacagagccttagctcgggtccagacaggagcagtgtctcgctgaggaagctgcaggagagttaattaaaaggcgttgaaacagaatgagccagacagcaaggacaaggtggccaacagcaaggagtccaaaaagccctctattgacgagatccacgatgttattgctcatgaggtttccgagctcgatgctgggaagaagaagtgatttgtatataagaaataaatgagatatagtaaaggagtgcaagagaatggcaaggtggtcaaattctatattacttgcagtcactggttcctcgttgacatgaatgaagttaccgttggcatagctgatttaatatataactgtccaactaactctcacctagatataacccatgtgtgtgtttccaatcatcaatgcggccgcctactcttccttgggacggagtccaagaacacgcaagtgctccaaatgtgaagcaaatgcttgccaaaacgtatccttgacaaggtatggaaccttgtactcgctgcaggtgttcttgatgatggccagaatatcgggataatggtgctgcgacacgttggggaacagatggtgcacagcctggtagttcaagctgccagtgatgctggtccagaggtgcgaatcgtgtgcgtaatcctgcgtagtctcgacctgcatagctgcccagtccttttggatgatcccgttctcgtcaggcaacggccactgaacttcctcaacaacgtggttcgcctggaaggtcagcgccagccagtaagacgacaccatgtccgcgaccgtgaacaagagcagcaccttgcccaggggcagatactgcaggggaacaatcaggcgataccagacaaagaaagccttgccgccccagaacatcacagtgtgccatgtcgagatgggattgacacgaatagcgtcattggtcttgacaaagtacaaaatgttgatgtcctgaatgcgcaccttgaacgccagcagtccgtacaggaaaggaacaaacatgtgctggttgatgtggttgacaaaccacttttggttgggcttgatacgacgaacatcgggctcagacgtcgacacgtcgggatctgctccagcaatgttggtgtaggggtgatggccgagcatatgttggtacatccacaccaggtacgatgctccgttgaaaaagtcgtgcgtggctcccagaatcttccagacagtggggttgtgggtcactgaaaagtgagacgcatcatgaagagggttgagtccgacttgtgcgcacgcaaatcccatgatgattgcaaacaccacctgaagccatgtgcgttcgacaacgaaaggcacaaagagctgcgcgtagtaggaagcgatcaaggatccaaagataagagcgtatcgtccccagatctctggtctattcttgggatcaatgttccgatccgtaaagtagccctcgactctcgtcttgatggttttgtggaacaccgttggctccgggaagatgggcagctcattcgagaccagtgtaccgacatagtacttcttcataatggcatctgcagccccaaacgcgtgatacatctcaaagaccggagtaacatctcggccagctccgagcaggagagtgtccactccaccaggatggcggctcaagaactttgtgacatcgtacaccctgccgcggatggccaagagtaggtcgtccttggtgttatgggccgccagctcttcccaggtgaaggtttttccttggtccgttcccatggccattgctgtagatatgtcttgtgtgtaagggggttggggtggttgtttgtgttcttgacttttgtgttagcaagggaagacgggcaaaaaagtgagtgtggttgggagggagagacgagccttatatataatgcttgtttgtgtttgtgcaagtggacgccgaaacgggcaggagccaaactaaacaaggcagacaatgcgagcttaattggattgcctgatgggcaggggttagggctcgatcaatgggggtgcgaagtgacaaaattgggaattaggttcgcaagcaaggctgacaagactttggcccaaacatttgtacgcggtggacaacaggagccacccatcgtctgtcacgggctagccggtcgtgcgtcctgtcaggctccacctaggctccatgccactccatacaatcccactagtgtaccgctaggccgcttttagctcccatctaagacccccccaaaacctccactgtacagtgcactgtactgtgtggcgatcaagggcaagggaaaaaaggcgcaaacatgcacgcatggaatgacgtaggtaaggcgttactagactgaaaagtggcacatttcggcgtgccaaagggtcctaggtgcgtttcgcgagctgggcgccaggccaagccgctccaaaacgcctctccgactccctccagcggcctccatatccccatccctctccacagcaatgttgttaagccttgcaaacgaaaaaatagaaaggctaataagcttccaatattgtggtgtacgctgcataacgcaacaatgagcgccaaacaacacacacacacagcacacagcagcattaaccat

SEQ ID NO: 70 - DNA, 12210 bp, artificial sequence
  Plasmid pDCQ392
ctcgggccgtctcttgggcttgatcggccttcttgcgcatctcacgcgctcctgcggcggcctgtagggcaggctcatacccctgccgaaccgcttttgtcagccggtcggccacggcttccggcgtctcaacgcgctttgagattcccagcttttcggccaatccctgcggtgcataggcgcgtggctcgaccgcttgcgggctgatggtgacgtggcccactggtggccgctccagggcctcgtagaacgcctgaatgcgcgtgtgacgtgccttgctgccctcgatgccccgttgcagccctagatcggccacagcggccgcaaacgtggtctggtcgcgggtcatctgcgctttgttgccgatgaactccttggccgacagcctgccgtcctgcgtcagcggcaccacgaacgcggtcatgtgcgggctggtttcgtcacggtggatgctggccgtcacgatgcgatccgccccgtacttgtccgccagccacttgtgcgccttctcgaagaacgccgcctgctgttcttggctggccgacttccaccattccgggctggccgtcatgacgtactcgaccgccaacacagcgtccttgcgccgcttctctggcagcaactcgcgcagtcggcccatcgcttcatcggtgctgctggccgcccagtgctcgttctctggcgtcctgctggcgtcagcgttgggcgtctcgcgctcgcggtaggcgtgcttgagactggccgccacgttgcccattttcgccagcttcttgcatcgcatgatcgcgtatgccgccatgcctgcccctcccttttggtgtccaaccggctcgacgggggcagcgcaaggcggtgcctccggcgggccactcaatgcttgagtatactcactagactttgcttcgcaaagtcgtgaccgcctacggcggctgcggcgccctacgggcttgctctccgggcttcgccctgcgcggtcgctgcgctcccttgccagcccgtggatatgtggacgatggccgcgagcggccaccggctggctcgcttcgctcggcccgtggacaaccctgctggacaagctgatggacaggctgcgcctgcccacgagcttgaccacagggattgcccaccggctacccagccttcgaccacatacccaccggctccaactgcgcggcctgcggccttgccccatcaatttttttaattttctctggggaaaagcctccggcctgcggcctgcgcgcttcgcttgccggttggacaccaagtggaaggcgggtcaaggctcgcgcagcgaccgcgcagcggcttggccttgacgcgcctggaacgacccaagcctatgcgagtgggggcagtcgaaggcgaagcccgcccgcctgccccccgagacctgcaggggggggggggcgctgaggtctgcctcgtgaagaaggtgttgctgactcataccaggcctgaatcgccccatcatccagccagaaagtgagggagccacggttgatgagagctttgttgtaggtggaccagttggtgattttgaacttttgctttgccacggaacggtctgcgttgtcgggaagatgcgtgatctgatccttcaactcagcaaaagttcgatttattcaacaaagccgccgtcccgtcaagtcagcgtaatgctctgccagtgttacaaccaattaaccaattctgattagaaaaactcatcgagcatcaaatgaaactgcaatttattcatatcaggattatcaataccatatttttgaaaaagccgtttctgtaatgaaggagaaaactcaccgaggcagttccataggatggcaagatcctggtatcggtctgcgattccgactcgtccaacatcaatacaacctattaatttcccctcgtcaaaaataaggttatcaagtgagaaatcaccatgagtgacgactgaatccggtgagaatggcaaaagcttatgcatttctttccagacttgttcaacaggccagccattacgctcgtcatcaaaatcactcgcatcaaccaaaccgttattcattcgtgattgcgcctgagcgagacgaaatacgcgatcgctgttaaaaggacaattacaaacaggaatcgaatgcaaccggcgcaggaacactgccagcgcatcaacaatattttcacctgaatcaggatattcttctaatacctggaatgctgttttcccggggatcgcagtggtgagtaaccatgcatcatcaggagtacggataaaatgcttgatggtcggaagaggcataaattccgtcagccagtttagtctgaccatctcatctgtaacatcattggcaacgctacctttgccatgtttcagaaacaactctggcgcatcgggcttcccatacaatcgatagattgtcgcacctgattgcccgacattatcgcgagcccatttatacccatataaatcagcatccatgttggaatttaatcgcggcctcgagcaagacgtttcccgttgaatatggctcataacaccccttgtattactgtttatgtaagcagacagttttattgttcatgatgatatatttttatcttgtgcaatgtaacatcagagattttgagacacaacgtggctttcccccccccccctgcaggtcccgagcctcacggcggcgagtgcgggggttccaagggggcagcgccaccttgggcaaggccgaaggccgcgcagtcgatcaacaagccccggaggggccactttttgccggagggggagccgcgccgaaggcgtgggggaaccccgcaggggtgcccttctttgggcaccaaagaactagatatagggcgaaatgcgaaagacttaaaaatcaacaacttaaaaaaggggggtacgcaacagctcattgcggcaccccccgcaatagctcattgcgtaggttaaagaaaatctgtaattgactgccacttttacgcaacgcataattgttgtcgcgctgccgaaaagttgcagctgattgcgcatggtgccgcaaccgtgcggcaccctaccgcatggagataagcatggccacgcagtccagagaaatcggcattcaagccaagaacaagcccggtcactgggtgcaaacggaacgcaaagcgcatgaggcgtgggccgggcttattgcgaggaaacccacggcggcaatgctgctgcatcacctcgtggcgcagatgggccaccagaacgccgtggtggtcagccagaagacactttccaagctcatcggacgttctttgcggacggtccaatacgcagtcaaggacttggtggccgagcgctggatctccgtcgtgaagctcaacggccccggcaccgtgtcggcctacgtggtcaatgaccgcgtggcgtggggccagccccgcgaccagttgcgcctgtcggtgttcagtgccgccgtggtggttgatcacgacgaccaggacgaatcgctgttggggcatggcgacctgcgccgcatcccgaccctgtatccgggcgagcagcaactaccgaccggccccggcgaggagccgcccagccagcccggcattccgggcatggaaccagacctgccagccttgaccgaaacggaggaatgggaacggcgcgggcagcagcgcctgccgatgcccgatgagccgtgttttctggacgatggcgagccgttggagccgccgacacgggtcacgctgccgcgccggtagcacttgggttgcgcagcaacccgtaagtgcgctgttccagactatcggctgtagccgcctcgccgccctataccttgtctgcctccccgcgttgcgtcgcggtgcatggagccgggccacctcgacctgaatggaagccggcggcacctcgctaacggattcaccgtttttatcaggctctgggaggcagaataaatgatcatatcgtcaattattacctccacggggagagcctgagcaaactggcctcaggcatttgagaagcacacggtcacactgcttccggtagtcaataaaccggtaaaccagcaatagacataagcggctatttaacgaccctgccctgaaccgacgaccgggtcgaatttgctttcgaatttctgccattcatccgcttattatacttattcaggcgtagcaccaggcgtttaagggcaccaataactgccttaaaaaaattacgccccgccctgccactcatcgcagtactgttgtaattcattaagcattctgccgacatggaagccatcacagacggcatgatgaacctgaatcgccagcggcatcagcaccttgtcgccttgcgtataatatttgcccatggtgaaaacgggggcgaagaagttgtccatattggccacgtttaaatcaaaactggtgaaactcacccagggattggctgagacgaaaaacatattctcaataaaccctttagggaaataggccaggttttcaccgtaacacgccacatcttgcgaatatatgtgtagaaactgccggaaatcgtcgtggtattcactccagagcgatgaaaacgtttcagtttgctcatggaaaacggtgtaacaagggtgaacactatcccatatcaccagctcaccgtctttcattgccatacggaattcactagttaacgcggacgctgccagagctcggcaggacgcggcggagaagcagccgcccgagacctgatcgcctgcgccgcccccgccgccagcagcagaagcttctcctgcttgctggtggactggcggcgatcccaggccgtttcccccgcgccgtagaccttaaccccaatgcggcgataaacctctttcgccgtggcgatcgcccacgcagagcgcagcggcagcccggccagcccggccgacgcagaggcgtagtagggctccgcctcgctcaccagccgccgcgccagattcgccagcgccgggcgatgagcgcgatcggcaaagtgaagacgatccagcccggcctcctccagccagctttccggcaaatagcagcggccgactcgcgcatcctcaacgatatcgcgtgcaatattggtcagctgaaaggcgaggccgagatcgcaggcgcgatccagcaccgcctcgtcgcgcacccccataatctgcgccatcattaatcccaccacgcccgccacgtggtagcagtagcgcagcgtatcctgaaaggtttcataacgcgcgccgcggacgtccattgcaaacccttccagatggtcgaaagcgtaagcgggagagatatcgtgggcgatcgccacctcctgaaaggcggcgaaggcgggttcatgcatttgcgcgcccgcgtaggcctggcgggttttgcgctccagatttgccagacgctgctgcggggtctgcgccgaaggaacctcgcctggaaagccaagctgctggtcatcgatcacatcatcacagtggcggcaccaggcgtagagcatcagcacgctgcggcgcgttttcgcgtcgaacagctttgaggcggtggcgaaactcttcgaaccgacttccatcgtctctacggcatggtgcagcagcgtcggattatgcatgcagatcctccagcatcaggcttgcggtggctttggcggaaccgatcacgccgggaatgcccgcgcctgggtgcgtacccgcgccgaccagatagagattgcggatatggctgtcgcggttatggggccggaaccaggcgctctggcgcaaaatcggctcaacggaaaacgcagagccctgataggcattaagctggtcgcggaaatcgaacggcgtgaagatgcggtgagtgaccagctggctgcgcaggccgggcatatagtgctcttcgagataggcgaaaatgcgatcgcgcaggcgcggcccctcaacgttccagtcgagatcggcggtgccaagatggggaaccggtgccagcacgtagtagctgccgcagcccggcggcgccagcgagggatcggtcacgcagggcgcatggagatagagcgagaaatcttccgccagcccgtcgcggttaaagatctcgtcaatcagctcacggtagcgcggcccgaagcagacggtgtggtgcgccagctgatcgtgatgatggttcaggccaaaatagagcacaaacagcgagttgctcatgcgcttgcctttcagctttttggcctgcgcggcggcggcggggtgcctgccgagcagatcgccataggtatgcaccacatcggcgttagaggcgaccgcgcgggtttcaaatacccgaccatcctccagatgcacggcggaaatcgcggcctctttcgcctcgatatggctgacgcgcgcgttcagctccagcgtgccgcctaaatcctggaacagcttcagcatgccctgcaccagcgcgccggtgccgccgcgcggaaaccagacgccccattcgcgctccagcgcgtggatcagcgtatagatcgacgaggtggcgaaggggttgccgccgaccagcagcgagtgaaacgaaaaggcctgccgcagcttatcatcctcgataaagctcgccaccttgctgtaaacgctgcgccacgcctgcaggcgcgccagctgcggtgcggcgcgcagcatatcgcggaacgacaaaaagggcacggtgccgagcttcaggtagccttcggcgaacacggcgcgcgaatagtcgaggaagcgctgatagcccgccacgtcggctggattaaatttgcggatctccgcttccagtcgcgcctgatcgttatcgtagttaaacacctcgcccgtctcccagcagagccggtaaaaaggggtcaccggcagcagctcgacatagtcgcgcatcgattttcccgccagggcgaacagctcttcaatagcggacggatcggtgatcaccgtcgggcccgcgtcaaaggtaaagccctgatcctgataaacataggcgcggccgcccggcttgtcgcgctgctccagcagccgcgttggaacgcctgctgcctggaggcgaattgccagtgccagcccgccaaatcctgcgccaattaccgtggtgtgcttcatcgtgatgctcttcgtccagaagggtgggtgagaatagcctgcagcgccgccagcaccgggaccggcggcttgccgctaagaatgcgcgcgcggtcggccagcgtcagccgtccggcgtaaaaccgggcgatcagcccctcgggcaggccgtaaaagcgctgcattacgcgccagcgccgatcgccctcggccgccaggaacagcatgcggttaagcatgcggaaaaagccctgtttacgccacgctgcctgcgcaaagcggtgaatacgcggcgcgagcgcctcaggggagaagtccgcctctgcggcgagcgcgtccgccagcgtcgccgccagcggcagggagtagccggtcgtggggtgaaaaagcccggcgcgcaggccgacgcagggggcgcgatgatgccagaagcggtcgaaatcgcccgccagcgtaatcggcagcgcgccgcgctcttcgcgcagcagcgtctccagctgccagccctggcgggtggcgtagtcgcagatattctgccgcgcctgcgccgtcgccagcgaggcgtcgttaatatagtgggtatcttcaatcagcagacgcgtcggcgagagcggcagggtatagacgaagcgatagcccccctgctgatccacggccgcgtccatcagaatcggcccctccagctgatgcggctggctcaggcgccactcctgaccgacaaaagactgaaagccaatctgcagggcggcgtcgggctgatagccgcggccgtcaatgacggcgcgcgcgcgcagcacttcgccgctggcgagctgcacgtgatcggggccgctgctggcgacggtctggttaagccgcagcgcgtcgccgagcgtcgcgcgcagcacctcgtcaaagcgcgcggaagtgacgcaaaaatagccgctgttaagctggcgcgtcagcgcgggaaagcgtacctcgtagtgcggccagcggtgcgccaccagcggcgcaatccactgatgctgcgcggcgctgagatcctcttcgtgaaagcaccaggtgtgattgccaccggcgtgggcgtgggcatcaagcaccagcacgcgcagctgcggctggagcgctttcagccgcagcgccagcagcccgttcgccagaccggcgccgagcaacagcagatcatactgcgatgtcatagtacttctccgcgcgctgtacatcatagcgtttctccggcgcgatgcagcggcgcaaggcgcagctggcgcagattagcgctgccggtgcagaaacaggcgacgcgcagctgttcaatcagcgtgttaaagtgcgcgaccaccgcatccgtagagtgcagggcgctgctgagcaccgccgccgcctggccaacgatatccgcgccgagccgcagcgccttcgccgcgtcgatgccgtcgcggatgccgcctgaggcgataagcggtatggcaggcagcctgtcgcgcaccgcgcgtaaggcttcatctgtgggaataccccagctggcaaaggccatcgccaccgcgcgctgctgcggggtgctggcgcgttcgccctctaccgccgcccagctggtgccgcccgcacctgcgatatcgatcatgctgacgcccgcctcggcgagccgctgcgcaacctcggccgagatgcccgcgccaacctctttcaccaccaccggcacctccagcgacttcaccagctgcgcaatcgcctgcagtacgccgcgccagtcgcgatcgccgccgcgctgcagcgcttcctgcagcggattaagatggacgatcagcgcatccgcctcgatcatgcttaccgcatttcgcgccagcctgcggccctgttcgcccagaatctgcgccgcgccgaggttcgccagcagcggaatatccggggcgatacggcgtaaatcgcgcgtcaggccagaatcgttgtcgctttccagcgccacgcgctgcgaaccgacccccagcgccagacccagcgtctgcgccgcttcggcaagatgatgattaatcgagagggcgcgcgccgcgccgccggtcattgagctaataagaaagggcgcctgcatggggcgatcgaacagccgcgtgcgcagatcgatctgatccaggtgcagctccggcagggcgcagtgggtaaagtgccagcgggcgaagctgcccgacgccggcgcggtattacgcagaacaatgtccagatgatcgtttttgcgcttcgtcaggtccgtgtccttcattgctgctccatatactcagacaggaaacgcgcggtcagccgaccatagcgagttttttatcgaaccaggcctgcacgaagtgccgggtggcgtagccgctgtcgcaggccgaagcgaggtggcgatcggcgcgtcgcagatggtcgcgcaggcgcttttctaccgctttgctgcccagcatgttcaccagcgtcgatttccccacgtcctgatgggcatcttttcccgtgtcgctctggccgtcggtcaggtcgtccagcagctgaaaggcctggccgagatcccgcgcgaagcggtgcagcttttcacgcgacgccagcggcgcgccggcgatgatggcggccatctgcatcgccgcgctgaacagcgcgctggttttaaagtggttggtcagctgaatggcgtcggcgctgcgcggctggccgccttcggtcagatcgagaaactgtccctgcaccagcccctgaatgccgactgaatgggaaagctccgccacggcctgggtcttcgcctggctgctgatgccgtccgccagcgcaatcacgccgaaggcgcggctcagcagggcgacggcggcgagaatcgccaccggctcgccgaactggcgatggattgtcggccggccgcgccgcagttcggcatcgtccatgcagggaatatcgtcgagtatcagcgaggcggcatgcaccatctcgacggcgcaggcgaagtcgagcagcccgctgagttcgtcgcgatagccaaggtcgtgagcggccagcatcagcagtaccggccggatgcgtttgcccggtgccagcgcgccttcgcgcatggcgagccccacgcagtctcgttcgctttctaccggcagcagtcggtcaagacgctgttcaataatcgccagtaacatcagaggatcgctgtagatgagagtagagtctctttcagcaaaaatggtcataatggcagtccttacttgcacctagttcaggcgccgttgctggatgagccgcgtttctgagacagttcggccttcagcgcgcgcgccgaccgcacccaaaggaagccgaacgatacgcagccctcgcgtgtccgcaccgcgtgatgcagccggtgggcctgaatgcgtcgcgtccagaacgccgagcgccctgcgatccctgtcgggaaccggcgatgcaccagcccgtcgtgaaagaagaaataaaccagtccataggccgtaacgcccaggccgatcggcagcatccaaggccacagatgtagacccaaggcgacgaggatgatggccggggcggcgaacaccaccgcgaacaggtcgttcctttccagcacgtcgtcgtgcggctcatgatggctgcggtgccaggtccacagcaggccgtgcatgacatagcgatgcatcgcccaggcgaagacctccatccccaggaaggtggcgaggaacagcaggatcatcgtcggccaggacatggtttattcctcctttctagtctagctgaacaaactccaccagggcttccagggggtcaggtggtgttcgtggtggcggccgaagtggaagcaggtgagcaacgacaggaccgggccgaaggggctggtgcgggcgttgtggttgtcggggaaggcgtcgtcggtgtgcctatgaggcagccaggtgccgaatgtgaaaagctgtagcgccgagagcagggcgggcgcggcccaaaagaccagaagattgggcatacgggcgccgaggatcagcaccgcaacggccacgagcaccgtcagaacggccagttctcgccagccgaaataggtgcggaaaaagccgtagaaccagggcaggaaagcgcgcggggcgtcggcgtgaaagtcgggatcgtccgccgtaccgggcgcagcgtgatgggcgtggtgtgcggtcttcaaaggcgtgaaccgaaatccggcgtagagggccagcgccaggctgccgatcgccgtgttcagccgtgggcgtgccggggccagcgagccgtgcatggcgtcgtgggcgacgatgaacaggccgacggatagccaggtctggccggcgacgatcagcggaacggtcaggacgctccagatcgtccagcgatgaaaatagacgccgtagatgtgcagggtcagccaggccgcggcgatcaggccagccagcgtcaggccgatcagggcctggttcgggacgacccgtgacattggcgtgacggcggacatggcgcgacacttagcgcatcgcggcccggtaagcatcctgttcgcttgccgcatggtttattcctccttgctagggaattccggatgagcattcatcaggcgggcaagaatgtgaataaaggccggataaaacttgtgcttatttttctttacggtctttaaaaaggccgtaatatccagctgaacggtctggttataggtacattgagcaactgactgaaatgcctcaaaatgttctttacgatgccattgggatatatcaacggtggtatatccagtgatttttttctccattttagcttccttagctcctgaaaatctcgataactcaaaaaatacgcccggtagtgatcttatttcattatggtgaaagttggaacctcttacgtgccgatcaacgtctcattttcgccaaaagttggcccagggcttcccggtatcaacagggacaccaggatttatttattctgcgaagtgatcttccgtcacaggtatttattcggcgcaaagggcctcgtgatacgcctatttttataggttaatgtcatgataataatggtttcttagacgtcaggtggcacttttcggggaaatgtgcgcgcccgcgttcctgctggcgctgggcctgtttctggcgctggacttcccgctgttccgtcagcagcttttcgcccacggccttgatgatcgcggcggccttggcctgcatatcccgattcaacggccccagggcgtccagaacgggcttcaggcgctcccgaaggt

SEQ ID NO: 71 - DNA, 1161 bp, Pantoea stewartii DC413
  CDS (1)..(1161)
atggcatcgcagtatgatctgctgttgctcggcgccggtctggcgaacgggctgctggcgctgcggctgaaagcgctccagccgcagctgcgcgtgctggtgcttgatgcccacgcccacgccggtggcaatcacacctggtgctttcacgaagaggatctcagcgccgcgcagcatcagtggattgcgccgctggtggcgcaccgctggccgcactacgaggtacgctttcccgcgctgacgcgccagcttaacagcggctatttttgcgtcacttccgcgcgctttgacgaggtgctgcgcgcgacgctcggcgacgcgctgcggcttaaccagaccgtcgccagcagcggccccgatcacgtgcagctcgccagcggcgaagtgctgcgcgcgcgcgccgtcattgacggccgcggctatcagcccgacgccgccctgcagattggctttcagtcttttgtcggtcaggagtggcgcctgagccagccgcatcagctggaggggccgattctgatggacgcggccgtggatcagcaggggggctatcgcttcgtctataccctgccgctctcgccgacgcgtctgctgattgaagatacccactatattaacgacgcctcgctggcgacggcgcaggcgcggcagaatatctgcgactacgccacccgccagggctggcagctggagacgctgctgcgcgaagagcgcggcgcgctgccgattacgctggcgggcgatttcgaccgcttctggcatcatcgcgccccctgcgtcggcctgcgcgccgggctttttcaccccacgaccggctactccctgccgctggcggcgacgctggcggacgcgctcgccgcagaggcggacttctcccctgaggcgctcgcgccgcgtattcaccgctttgcgcaggcagcgtggcgtaaacagggctttttccgcatgcttaaccgcatgctgttcctggcggccgagggcgatcggcgctggcgcgtaatgcagcgcttttacggcctgcccgaggggctgatcgcccggttttacgccggacggctgacgctggccgaccgcgcgcgcattcttagcggcaagccgccggtcccggtgctggcggcgctgcaggctattctcacccacccttctggacgaagagcatcacga

SEQ ID NO: 72 - protein, 387 aa, Pantoea stewartii DC413
MASQYDLLLLGAGLANGLLALRLKALQPQLRVLVLDAHAHAGGNHTWCFHEEDLSAAQHQWIAPLVAHRWPHYEVRFPALTRQLNSGYFCVTSARFDEVLRATLGDALRLNQTVASSGPDHVQLASGEVLRARAVIDGRGYQPDAALQIGFQSFVGQEWRLSQPHQLEGPILMDAAVDQQGGYRFVYTLPLSPTRLLIEDTHYINDASLATAQARQNICDYATRQGWQLETLLREERGALPITLAGDFDRFWHHRAPCVGLRAGLFHPTTGYSLPLAATLADALAAEADFSPEALAPRIHRFAQAAWRKQGFFRMLNRMLFLAAEGDRRWRVMQRFYGLPEGLIARFYAGRLTLADRARILSGKPPVPVLAALQAILTHPSGRRASR

SEQ ID NO: 73 - DNA, 486 bp, Brevundimonas vesicularis DC263
  CDS (1)..(486)
atggcctggccgacgatgatcctgctgttcctcgccaccttcctggggatggaggtcttcgcctgggcgatgcatcgctatgtcatgcacggcctgctgtggacctggcaccgcagccatcatgagccgcacgacgacgtgctggaaaggaacgacctgttcgcggtggtgttcgccgccccggccatcatcctcgtcgccttgggtctacatctgtggccttggatgctgccgatcggcctgggcgttacggcctatggactggtttatttcttctttcacgacgggctggtgcatcgccggttcccgacagggatcgcagggcgctcggcgttctggacgcgacgcattcaggcccaccggctgcatcacgcggtgcggacacgcgagggctgcgtatcgttcggcttcctttgggtgcggtcggcgcgcgcgctgaaggccgaactgtctcagaaacgcggctcatccagcaacggcgcctga

SEQ ID NO: 74 - protein, 161 aa, Brevundimonas vesicularis DC263
MAWPTMILLFLATFLGMEVFAWAMHRYVMHGLLWTWHRSHHEPHDDVLERNDLFAVVFAAPAIILVALGLHLWPWMLPIGLGVTAYGLVYFFFHDGLVHRRFPTGIAGRSAFWTRRIQAHRLHHAVRTREGCVSFGFLWVRSARALKAELSQKRGSSSNGA

SEQ ID NO: 75 - DNA, 780 bp, Brevundimonas vesicularis DC263
  CDS (55)..(780)
atggggcaagcgaacaggatgcttaccgggccgcgatgcgctaagtgtcgcgccatgtccgccgtcacgccaatgtcacgggtcgtcccgaaccaggccctgatcggcctgacgctggctggcctgatcgccgcggcctggctgaccctgcacatctacggcgtctattttcatcgctggacgatctggagcgtcctgaccgttccgctgatcgtcgccggccagacctggctatccgtcggcctgttcatcgtcgcccacgacgccatgcacggctcgctggccccggcacgcccacggctgaacacggcgatcggcagcctggcgctggccctctacgccggatttcggttcacgcctttgaagaccgcacaccacgcccatcacgctgcgcccggtacggcggacgatcccgactttcacgccgacgccccgcgcgctttcctgccctggttctacggctttttccgcacctatttcggctggcgagaactggccgttctgacggtgctcgtggccgttgcggtgctgatcctcggcgcccgtatgcccaatcttctggtcttttgggccgcgcccgccctgctctcggcgctacagcttttcacattcggcacctggctgcctcataggcacaccgacgacgccttccccgacaaccacaacgcccgcaccagccccttcggcccggtcctgtcgttgctcacctgcttccacttcggccgccaccacgaacaccacctgaccccctggaagccctggtggagtttgttcagctag

SEQ ID NO: 76 - protein, 241 aa, Brevundimonas vesicularis DC263
MSAVTPMSRVVPNQALIGLTLAGLIAAAWLTLHIYGVYFHRWTIWSVLTVPLIVAGQTWLSVGLFIVAHDAMHGSLAPARPRLNTAIGSLALALYAGFRFTPLKTAHHAHHAAPGTADDPDFHADAPRAFLPWFYGFFRTYFGWRELAVLTVLVAVAVLILGARMPNLLVFWAAPALLSALQLFTFGTWLPHRHTDDAFPDNHNARTSPFGPVLSLLTCFHFGRHHEHHLTPWKPWWSLFS

SEQ ID NO: 77 - DNA, 25 bp, artificial sequence
  Primer crtY392_forward
ccatggcatcgcagtatgatctgct

SEQ ID NO: 78 - DNA, 33 bp, artificial sequence
  Primer crtY392_reverse
gcggccgctcatcgtgatgctcttcgtccagaa

SEQ ID NO: 79 - DNA, 24 bp, artificial sequence
  Primer crtZ392_forward
ccatggcctggccgacgatgatcc

SEQ ID NO: 80 - DNA, 34 bp, artificial sequence
  Primer crtZ392_reverse
gcggccgcagttcaggcgccgttgctggatgagc

SEQ ID NO: 81 - DNA, 23 bp, artificial sequence
  Primer crtW392_forward
ccatggggcaagcgaacaggatg

SEQ ID NO: 82 - DNA, 34 bp, artificial sequence
  Primer crtW392_reverse
gcggccgcagtctagctgaacaaactccaccagg

SEQ ID NO: 83 - DNA, 20 bp, artificial sequence
  Primer exp_forward
gttatgcagcgtacaccaca

SEQ ID NO: 84 - DNA, 27 bp, artificial sequence
  Primer HY-339_reverse
ctgtcgagcctgtgctgtagccaagga

SEQ ID NO: 85 - DNA, 14079 bp, artificial sequence
  Plasmid pYPS106
cgatgagcctaaaatgaacccgagtatatctcataaaattctcggtgagaggtctgtgactgtcagtacaaggtgccttcattatgccctcaaccttaccatacctcactgaatgtagtgtacctctaaaaatgaaatacagtgccaaaagccaaggcactgagctcgtctaacggacttgatatacaaccaattaaaacaaatgaaaagaaatacagttctttgtatcatttgtaacaattaccctgtacaaactaaggtattgaaatcccacaatattcccaaagtccacccctttccaaattgtcatgcctacaactcatataccaagcactaacctaccgtttaaacaagctaccaccacactcgttgggtgcagtcgccagcttaaagatatctatccacatcagccacaactcccttcctttaataaaccgactacacccttggctattgaggttatgagtgaatatactgtagacaagacactttcaagaagactgtttccaaaacgtaccactgtcctccactacaaacacacccaatctgcttcttctagtcaaggttgctacaccggtaaattataaatcatcatttcattagcagggcagggccctttttatagagtcttatacactagcggaccctgccggtagaccaacccgcaggcgcgtcagtttgctccttccatcaatgcgtcgtagaaacgacttactccttcttgagcagctccttgaccttgttggcaacaagtctccgacctcggaggtggaggaagagcctccgatatcggcggtagtgataccagcctcgacggactccttgacggcagcctcaacagcgtcaccggcgggcttcatgttaagagagaacttgagcatcatggcggcagacagaatggtggcaatggggttgaccttctgcttgccgagatcgggggcagatccgtgacagggctcgtacagaccgaacgcctcgttggtgtcgggcagagaagccagagaggcggagggcagcagacccagagaaccggggatgacggaggcctcgtcggagatgatatcgccaaacatgttggtggtgatgatgataccattcatcttggagggctgcttgatgaggatcatggcggccgagtcgatcagctggtggttgagctcgagctgggggaattcgtccttgaggactcgagtgacagtctttcgccaaagtcgagaggaggccagcacgttggccttgtcaagagaccacacgggaagaggggggttgtgctgaagggccaggaaggcggccattcgggcaattcgctcaacctcaggaacggagtaggtctcggtgtcggaagcgacgccagatccgtcatcctcctttcgctctccaaagtagatacctccgacgagctctcggacaatgatgaagtcggtgccctcaacgtttcggatgggggagagatcggcgagcttgggcgacagcagctggcagggtcgcaggttggcgtacaggttcaggtcctttcgcagcttgaggagaccctgctcgggtcgcacgtcggttcgtccgtcgggagtggtccatacggtgttggcagcgcctccgacagcaccgagcataatagagtcagcctttcggcagatgtcgagagtagcgtcggtgatgggctcgccctccttctcaatggcagctcctccaatgagtcggtcctcaaacacaaactcggtgccggaggcctcagcaacagacttgagcaccttgacggcctcggcaatcacctcggggccacagaagtcgccgccgagaagaacaatcttcttggagtcagtcttggtcttcttagtttcgggttccattgtggatgtgtgtggttgtatgtgtgatgtggtgtgtggagtgaaaatctgtggctggcaaacgctcttgtatatatacgcacttttgcccgtgctatgtggaagactaaacctccgaagattgtgactcaggtagtgcggtatcggctagggacccaaaccttgtcgatgccgatagcgctatcgaacgtaccccagccggccgggagtatgtcggaggggacatacgagatcgtcaagggtttgtggccaactggtaaataaatgatgactcaggcgacgacggaattcgacagcaactactcctttcaccaaccatgtgcattttagctcgaataacattcacaggcttggtgatctacatccatggtgtctggccgattaccgtggtgttttggcagtaacgagaatattgagtgaactcttcccatcaccaataaagactcatactacaatcacgagcgcttcagctgccactatagtgttggtgacacaatacccctcgatgctgggcattactgtagcaagagatattcatttcatggcgcattttccagtctacctgactttttagtgccgatttcttctccacattttacgctcagtgtgaaaagttggagtcgacttgcgccattatgtaagcagcgtgtactcctctgactgtccatatggtttgctccatctcaccctcatcgttttcattgttcacaggcggccacaaaaaaactgtcttctctccttctctcttcgccttagtctactcggaccagttttagtttagcttggcgccactggataaatgagacctcaggccttgtgatgaggaggtcacttatgaagcatgttaggaggtgcttgtatggatagagaagcacccaaaataataagaataataataaaacagggggcgttgtcatttcatatcgtgttttcaccatcaatacacctccaaacaatgcccttcatgtggccagccccaatattgtcctgtagttcaactctatgcagctcgtatcttattgagcaagtaaaactctgtcagccgatattgcccgacccgcgacaagggtcaacaaggtggtgtaaggccttcgcagaagtcaaaactgtgccaaacaaacatctagagtctctttggtgtttctcgcatatatttwatcggctgtcttacgtatttgcgcctcggtaccggactaatttcggatcatccccaatacgctttttcttcgcagctgtcaacagtgtccatgatctatccacctaaatgggtcatatgaggcgtataatttcgtggtgctgataataattcccatatatttgacacaaaacttccccccctagacatacatctcacaatctcacttcttgtgcttctgtcacacatctcctccagctgacttcaactcacacctctgccccagttggtctacagcggtataaggtttctccgcatagaggtgcaccactcctcccgatacttgtttgtgtgacttgtgggtcacgacatatatatctacacacattgcgccaccctttggttcttccagcacaacaaaaacacgacacgctaaccatgggaacggaccaaggaaaaaccttcacctgggaagagctggcggcccataacaccaaggacgacctactcttggccatccgcggcagggtgtacgatgtcacaaagttcttgagccgccatcctggtggagtggacactctcctgctcggagctggccgagatgttactccggtctttgagatgtatcacgcgtttggggctgcagatgccattatgaagaagtactatgtcggtacactggtctcgaatgagctgcccatcttcccggagccaacggtgttccacaaaaccatcaagacgagagtcgagggctactttacggatcggaacattgatcccaagaatagaccagagatctggggacgatacgctcttatctttggatccttgatcgcttcctactacgcgcagctctttgtgcctttcgttgtcgaacgcacatggcttcaggtggtgtttgcaatcatcatgggatttgcgtgcgcacaagtcggactcaaccctcttcatgatgcgtctcacttttcagtgacccacaaccccactgtctggaagattctgggagccacgcacgactttttcaacggagcatcgtacctggtgtggatgtaccaacatatgctcggccatcacccctacaccaacattgctggagcagatcccgacgtgtcgacgtctgagcccgatgttcgtcgtatcaagcccaaccaaaagtggtttgtcaaccacatcaaccagcacatgtttgttcctttcctgtacggactgctggcgttcaaggtgcgcattcaggacatcaacattttgtactttgtcaagaccaatgacgctattcgtgtcaatcccatctcgacatggcacactgtgatgttctggggcggcaaggctttctttgtctggtatcgcctgattgttcccctgcagtatctgcccctgggcaaggtgctgctcttgttcacggtcgcggacatggtgtcgtcttactggctggcgctgaccttccaggcgaaccacgttgttgaggaagttcagtggccgttgcctgacgagaacgggatcatccaaaaggactgggcagctatgcaggtcgagactacgcaggattacgcacacgattcgcacctctggaccagcatcactggcagcttgaactaccaggctgtgcaccatctgttccccaacgtgtcgcagcaccattatcccgatattctggccatcatcaagaacacctgcagcgagtacaaggttccataccttgtcaaggatacgttttggcaagcatttgcttcacatttggagcacttgcgtgttcttggactccgtcccaaggaagagtaggcggccgcaagtgtggatggggaagtgagtgcccggttctgtgtgcacaattggcaatccaagatggatggattcaacacagggatatagcgagctacgtggtggtgcgaggatatagcaacggatatttatgtttgacacttgagaatgtacgatacaagcactgtccaagtacaatactaaacatactgtacatactcatactcgtacccgggcaacggtttcacttgagtgcagtggctagtgctcttactcgtacagtgtgcaatactgcgtatcatagtctttgatgtatatcgtattcattcatgttagttgcgtacgttatagttggagcaagggagaaatgtagagtgtgaaagactcactatggtccgggcttatctcgaccaatagccaaagtctggagtttctgagagaaaaaggcaagatacgtatgtaacaaagcgacgcatggtacaataataccggaggcatgtatcatagagagttagtggttcgatgatggcactggtgcctggtatgactttatacggctgactacatatttgtcctcagacatacaattacagtcaagcacttacccttggacatctgtaggtaccccccggccaagacgatctcagcgtgtcgtatgtcggattggcgtagctccctcgctcgtcaattggctcccatctactttcttctgcttggctacacccagcatgtctgctatggctcgttttcgtgccttatctatcctcccagtattaccaactctaaatgacatgatgtgattgggtctacactttcatatcagagataaggagtagcacagttgcataaaaagcccaactctaatcagcttcttcctttcttgtaattagtacaaaggtgattagcgaaatctggaagcttagttggccctaaaaaaatcaaaaaaagcaaaaaacgaaaaacgaaaaaccacagttttgagaacagggaggtaacgaaggatcgtatatatatatatatatatatatacccacggatcccgagaccggcctttgattcttccctacaaccaaccattctcaccaccctaattcacaaccatggtcgctggcaagtccggagctgcagcccacgtgacccactcttccactctccctcgagagtaccacggtgctaccaacgactcccgatctgaggctgccgatgtcaccgtctcgtctatcgacgccgagaaggagatgattatcaacggacgagtgtacgacgtctcctcgttcgtgaagcgacaccctggtggctccgtcatcaagttccagctcggagcagatgcttctgacgcttacaacaacttccacgtccgatcgaagaaggctgacaagatgctgtactctcttccctcccgacctgccgaggctggctatgcacaggacgacatctctagagactttgagaagctgcgactggaactgaaagaggaaggttacttcgagcccaatctggtgcacgtgtcctaccgatgtgtcgaggtgcttgccatgtactgggctggcgtccagctgatctggtccggatactggttcctcggtgccatcgttgctggaattgctcaaggtcgatgcggatggctccagcatgaaggcggacactactcgctcactggcaacatcaagattgaccgacatctccagatggccatctatggactgggctgtggtatgtctggctgctactggagaaaccagcacaacaaacatcacgccactcctcagaagctcggaaccgatcccgacctgcagaccatgcctctcgttgccttccacaagattgtcggagccaaggcacgaggcaagggtaaagcctggcttgcttggcaagctcccctcttctttggaggcatcatttgctccctggtctctttcggctggcagttcgttctccaccccaatcatgcactgcgagtgcacaaccatctcgaactggcctacatgggtctccgatacgttctctggcaccttgcctttggccatctgggactcctgtcctctcttcgactgtatgccttctacgtggctgtcggtggcacctacatcttcaccaacttcgccgtctcccatactcacaaggatgtcgttcctcccaccaagcacatttcgtgggctctgtactctgccaaccacactaccaactgttccgactctccctttgtcaactggtggatggcctacctcaacttccagatcgagcaccatctgttcccctccatgcctcagtacaaccaccccaagattgctcctcgagtgcgagcactcttcgagaagcacggagtcgagtacgacgtccgaccctatctggaatgctttcgagtgacctacgtcaacctccttgctgttggcaaccctgagcactcctaccacgagcatactcactaagcggccgcatgagaagataaatatataaatacattgagatattaaatgcgctagattagagagcctcatactgctcggagagaagccaagacgagtactcaaaggggattacaccatccatatccacagacacaagctggggaaaggttctatatacactttccggaataccgtagtttccgatgttatcaatgggggcagccaggatttcaggcacttcggtgtctcggggtgaaatggcgttcttggcctccatcaagtcgtaccatgtcttcatttgcctgtcaaagtaaaacagaagcagatgaagaatgaacttgaagtgaaggaatttaaatgtaacgaaactgaaatttgaccagatattgtgtccgcggtggagctccagcttttgttccctttagtgagggttaatttcgagcttggcgtaatcatggtcatagctgtttcctgtgtgaaattgttatccgctcacaagcttgacaatggatggtgtgtcgtatcaggctggggaacaattgtgcttaagtatgctgcagttgagtaagagtcatcgctccaccaaaataaagtttgccattagggttggagagagagatggtggctggaagaattaaatgacatcaagctgaggattgtgggtgtgcaataacacatgttaggggtgacctgtggctcgaaatctgataattattttgtaactttatgattattcttagattttttaatattcctctatataacacataagtagctgtcgtctagttgttcatagcctgactcctgcaatagattagtgcagagtgattttgtgcaattgagagccacggttgagtcaagtgactttgtgtgtgaagtcatcttacgtttcaagtctcacaggttactcaattggttggttgtctgccctttacagatatttacagtacctgagcgtaaagtcgttcatccacggaatgactgttcctgtcacgcagtcatgatcatggatgtggctggtcaggaaccattttggataggagacttagggattggactattattgaaaaaactgagccgaatatgatatagttctatttgaatgcagaacttctgatggtcaattcacttatttcaggcatatcggtcatggtggcagctgccacgatgttatctcgttggaaacctcggcgcgccagctgcattaatgaatcggccaacgcgcggggagaggcggtttgcgtattgggcgctcttccgcttcctcgctcactgactcgctgcgctcggtcgttcggctgcggcgagcggtatcagctcactcaaaggcggtaatacggttatccacagaatcaggggataacgcaggaaagaacatgtgagcaaaaggccagcaaaaggccaggaaccgtaaaaaggccgcgttgctggcgtttttccataggctccgcccccctgacgagcatcacaaaaatcgacgctcaagtcagaggtggcgaaacccgacaggactataaagataccaggcgtttccccctggaagctccctcgtgcgctctcctgttccgaccctgccgcttaccggatacctgtccgcctttctcccttcgggaagcgtggcgctttctcatagctcacgctgtaggtatctcagttcggtgtaggtcgttcgctccaagctgggctgtgtgcacgaaccccccgttcagcccgaccgctgcgccttatccggtaactatcgtcttgagtccaacccggtaagacacgacttatcgccactggcagcagccactggtaacaggattagcagagcgaggtatgtaggcggtgctacagagttcttgaagtggtggcctaactacggctacactagaagaacagtatttggtatctgcgctctgctgaagccagttaccttcggaaaaagagttggtagctcttgatccggcaaacaaaccaccgctggtagcggtggtttttttgtttgcaagcagcagattacgcgcagaaaaaaaggatctcaagaagatcctttgatcttttctacggggtctgacgctcagtggaacgaaaactcacgttaagggattttggtcatgagattatcaaaaaggatcttcacctagatccttttaaattaaaaatgaagttttaaatcaatctaaagtatatatgagtaaacttggtctgacagttaccaatgcttaatcagtgaggcacctatctcagcgatctgtctatttcgttcatccatagttgcctgactccccgtcgtgtagataactacgatacgggagggcttaccatctggccccagtgctgcaatgataccgcgagacccacgctcaccggctccagatttatcagcaataaaccagccagccggaagggccgagcgcagaagtggtcctgcaactttatccgcctccatccagtctattaattgttgccgggaagctagagtaagtagttcgccagttaatagtttgcgcaacgttgttgccattgctacaggcatcgtggtgtcacgctcgtcgtttggtatggcttcattcagctccggttcccaacgatcaaggcgagttacatgatcccccatgttgtgcaaaaaagcggttagctccttcggtcctccgatcgttgtcagaagtaagttggccgcagtgttatcactcatggttatggcagcactgcataattctcttactgtcatgccatccgtaagatgcttttctgtgactggtgagtactcaaccaagtcattctgagaatagtgtatgcggcgaccgagttgctcttgcccggcgtcaatacgggataataccgcgccacatagcagaactttaaaagtgctcatcattggaaaacgttcttcggggcgaaaactctcaaggatcttaccgctgttgagatccagttcgatgtaacccactcgtgcacccaactgatcttcagcatcttttactttcaccagcgtttctgggtgagcaaaaacaggaaggcaaaatgccgcaaaaaagggaataagggcgacacggaaatgttgaatactcatactcttcctttttcaatattattgaagcatttatcagggttattgtctcatgagcggatacatatttgaatgtatttagaaaaataaacaaataggggttccgcgcacatttccccgaaaagtgccacctgatgcggtgtgaaataccgcacagatgcgtaaggagaaaataccgcatcaggaaattgtaagcgttaatattttgttaaaattcgcgttaaatttttgttaaatcagctcattttttaaccaataggccgaaatcggcaaaatcccttataaatcaaaagaatagaccgagatagggttgagtgttgttccagtttggaacaagagtccactattaaagaacgtggactccaacgtcaaagggcgaaaaaccgtctatcagggcgatggcccactacgtgaaccatcaccctaatcaagttttttggggtcgaggtgccgtaaagcactaaatcggaaccctaaagggagcccccgatttagagcttgacggggaaagccggcgaacgtggcgagaaaggaagggaagaaagcgaaaggagcgggcgctagggcgctggcaagtgtagcggtcacgctgcgcgtaaccaccacacccgccgcgcttaatgcgccgctacagggcgcgtccattcgccattcaggctgcgcaactgttgggaagggcgatcggtgcgggcctcttcgctattacgccagctggcgaaagggggatgtgctgcaaggcgattaagttgggtaacgccagggttttcccagtcacgacgttgtaaaacgacggccagtgaattgtaatacgactcactatagggcgaattgggcccgacgtcgcatgcattccatagccacacctttgcctatggcttcacaaccgaaggcaattcgagaggtcgcgcttatggaatcgactcgtataaagctgaagggaaagggagacgttccgagcgctcagatgcaatagtcgtccagctaatgtggattcaaaaacaaccccaacagtaatcttgaaaatttgaacggatcaatctgaacactcttgctccaggtcattcttctaacgcacatccccagagtctagagggagttgtgttgtgaacatcctaataaacaatgcaatggattcgggatatcttctgtctcgccccctactcgatgtcgagtaaaccgatcaccaactaacaatactcctccgcgttctgccattgactctcaaacagacatcgctatcaacggaacagcatattttagcttcttaggacaataaatattgataatgccggctctccctcggtatattaagcaatccattcatacactcattcatcaggttaattttatatatataatttgtctattcaaacaccgtaaattactggtaccatcatctcctccttttcaaatacacgtctatttgcattaatgaaattactcgccaattcgcagaacgtgtttgtcgaacagagccttagctcgggtccagacaggagcagtgtctcgctgaggaagctgcaggagagttaattaaaaggcgttgaaacagaatgagccagacagcaaggacaaggtggccaacagcaaggagtccaaaaagccctctattgacgagatccacgatgttattgctcatgaggtttccgagctcgatgctgggaagaagaagtgatttgtatataagaaataaatgagatatagtaaaggagtgcaagagaatggcaaggtggtcaaattctatattacttgcagtcactggttcctcgttgacatgaatgaagttaccgttggcatagctgatttaatatataactgtccaactaactctcacctagatataacccatgtgtgtgtttccaatcatcaatgcggccgctcatcgtgatgctcttcgtccagaagggtgggtgagaatagcctgcagcgccgccagcaccgggaccggcggcttgccgctaagaatgcgcgcgcggtcggccagcgtcagccgtccggcgtaaaaccgggcgatcagcccctcgggcaggccgtaaaagcgctgcattacgcgccagcgccgatcgccctcggccgccaggaacagcatgcggttaagcatgcggaaaaagccctgtttacgccacgctgcctgcgcaaagcggtgaatacgcggcgcgagcgcctcaggggagaagtccgcctctgcggcgagcgcgtccgccagcgtcgccgccagcggcagggagtagccggtcgtggggtgaaaaagcccggcgcgcaggccgacgcagggggcgcgatgatgccagaagcggtcgaaatcgcccgccagcgtaatcggcagcgcgccgcgctcttcgcgcagcagcgtctccagctgccagccctggcgggtggcgtagtcgcagatattctgccgcgcctgcgccgtcgccagcgaggcgtcgttaatatagtgggtatcttcaatcagcagacgcgtcggcgagagcggcagggtatagacgaagcgatagcccccctgctgatccacggccgcgtccatcagaatcggcccctccagctgatgcggctggctcaggcgccactcctgaccgacaaaagactgaaagccaatctgcagggcggcgtcgggctgatagccgcggccgtcaatgacggcgcgcgcgcgcagcacttcgccgctggcgagctgcacgtgatcggggccgctgctggcgacggtctggttaagccgcagcgcgtcgccgagcgtcgcgcgcagcacctcgtcaaagcgcgcggaagtgacgcaaaaatagccgctgttaagctggcgcgtcagcgcgggaaagcgtacctcgtagtgcggccagcggtgcgccaccagcggcgcaatccactgatgctgcgcggcgctgagatcctcttcgtgaaagcaccaggtgtgattgccaccggcgtgggcgtgggcatcaagcaccagcacgcgcagctgcggctggagcgctttcagccgcagcgccagcagcccgttcgccagaccggcgccgagcaacagcagatcatactgcgatgccatggccattgctgtagatatgtcttgtgtgtaagggggttggggtggttgtttgtgttcttgacttttgtgttagcaagggaagacgggcaaaaaagtgagtgtggttgggagggagagacgagccttatatataatgcttgtttgtgtttgtgcaagtggacgccgaaacgggcaggagccaaactaaacaaggcagacaatgcgagcttaattggattgcctgatgggcaggggttagggctcgatcaatgggggtgcgaagtgacaaaattgggaattaggttcgcaagcaaggctgacaagactttggcccaaacatttgtacgcggtggacaacaggagccacccatcgtctgtcacgggctagccggtcgtgcgtcctgtcaggctccacctaggctccatgccactccatacaatcccactagtgtaccgctaggccgcttttagctcccatctaagacccccccaaaacctccactgtacagtgcactgtactgtgtggcgatcaagggcaagggaaaaaaggcgcaaacatgcacgcatggaatgacgtaggtaaggcgttactagactgaaaagtggcacatttcggcgtgccaaagggtcctaggtgcgtttcgcgagctgggcgccaggccaagccgctccaaaacgcctctccgactccctccagcggcctccatatccccatccctctccacagcaatgttgttaagccttgcaaacgaaaaaatagaaaggctaataagcttccaatattgtggtgtacgctgcataacgcaacaatgagcgccaaacaacacacacacacagcacacagcagcattaaccat

SEQ ID NO: 86 - DNA, 20 bp, artificial sequence
  Primer NT_forward
tatgtcggattggcgtagct

SEQ ID NO: 87 - DNA, 20 bp, artificial sequence
  Primer lip1-3_reverse
gtctgtggatgtggatggtg

SEQ ID NO: 88 - DNA, 13239 bp, artificial sequence
  Plasmid pYPS107
aaatgtaacgaaactgaaatttgaccagatattgtgtccgcggtggagctccagcttttgttccctttagtgagggttaatttcgagcttggcgtaatcatggtcatagctgtttcctgtgtgaaattgttatccgctcacaagcttgacaatggatggtgtgtcgtatcaggctggggaacaattgtgcttaagtatgctgcagttgagtaagagtcatcgctccaccaaaataaagtttgccattagggttggagagagagatggtggctggaagaattaaatgacatcaagctgaggattgtgggtgtgcaataacacatgttaggggtgacctgtggctcgaaatctgataattattttgtaactttatgattattcttagattttttaatattcctctatataacacataagtagctgtcgtctagttgttcatagcctgactcctgcaatagattagtgcagagtgattttgtgcaattgagagccacggttgagtcaagtgactttgtgtgtgaagtcatcttacgtttcaagtctcacaggttactcaattggttggttgtctgccctttacagatatttacagtacctgagcgtaaagtcgttcatccacggaatgactgttcctgtcacgcagtcatgatcatggatgtggctggtcaggaaccattttggataggagacttagggattggactattattgaaaaaactgagccgaatatgatatagttctatttgaatgcagaacttctgatggtcaattcacttatttcaggcatatcggtcatggtggcagctgccacgatgttatctcgttggaaacctcggcgcgccagctgcattaatgaatcggccaacgcgcggggagaggcggtttgcgtattgggcgctcttccgcttcctcgctcactgactcgctgcgctcggtcgttcggctgcggcgagcggtatcagctcactcaaaggcggtaatacggttatccacagaatcaggggataacgcaggaaagaacatgtgagcaaaaggccagcaaaaggccaggaaccgtaaaaaggccgcgttgctggcgtttttccataggctccgcccccctgacgagcatcacaaaaatcgacgctcaagtcagaggtggcgaaacccgacaggactataaagataccaggcgtttccccctggaagctccctcgtgcgctctcctgttccgaccctgccgcttaccggatacctgtccgcctttctcccttcgggaagcgtggcgctttctcatagctcacgctgtaggtatctcagttcggtgtaggtcgttcgctccaagctgggctgtgtgcacgaaccccccgttcagcccgaccgctgcgccttatccggtaactatcgtcttgagtccaacccggtaagacacgacttatcgccactggcagcagccactggtaacaggattagcagagcgaggtatgtaggcggtgctacagagttcttgaagtggtggcctaactacggctacactagaagaacagtatttggtatctgcgctctgctgaagccagttaccttcggaaaaagagttggtagctcttgatccggcaaacaaaccaccgctggtagcggtggtttttttgtttgcaagcagcagattacgcgcagaaaaaaaggatctcaagaagatcctttgatcttttctacggggtctgacgctcagtggaacgaaaactcacgttaagggattttggtcatgagattatcaaaaaggatcttcacctagatccttttaaattaaaaatgaagttttaaatcaatctaaagtatatatgagtaaacttggtctgacagttaccaatgcttaatcagtgaggcacctatctcagcgatctgtctatttcgttcatccatagttgcctgactccccgtcgtgtagataactacgatacgggagggcttaccatctggccccagtgctgcaatgataccgcgagacccacgctcaccggctccagatttatcagcaataaaccagccagccggaagggccgagcgcagaagtggtcctgcaactttatccgcctccatccagtctattaattgttgccgggaagctagagtaagtagttcgccagttaatagtttgcgcaacgttgttgccattgctacaggcatcgtggtgtcacgctcgtcgtttggtatggcttcattcagctccggttcccaacgatcaaggcgagttacatgatcccccatgttgtgcaaaaaagcggttagctccttcggtcctccgatcgttgtcagaagtaagttggccgcagtgttatcactcatggttatggcagcactgcataattctcttactgtcatgccatccgtaagatgcttttctgtgactggtgagtactcaaccaagtcattctgagaatagtgtatgcggcgaccgagttgctcttgcccggcgtcaatacgggataataccgcgccacatagcagaactttaaaagtgctcatcattggaaaacgttcttcggggcgaaaactctcaaggatcttaccgctgttgagatccagttcgatgtaacccactcgtgcacccaactgatcttcagcatcttttactttcaccagcgtttctgggtgagcaaaaacaggaaggcaaaatgccgcaaaaaagggaataagggcgacacggaaatgttgaatactcatactcttcctttttcaatattattgaagcatttatcagggttattgtctcatgagcggatacatatttgaatgtatttagaaaaataaacaaataggggttccgcgcacatttccccgaaaagtgccacctgatgcggtgtgaaataccgcacagatgcgtaaggagaaaataccgcatcaggaaattgtaagcgttaatattttgttaaaattcgcgttaaatttttgttaaatcagctcattttttaaccaataggccgaaatcggcaaaatcccttataaatcaaaagaatagaccgagatagggttgagtgttgttccagtttggaacaagagtccactattaaagaacgtggactccaacgtcaaagggcgaaaaaccgtctatcagggcgatggcccactacgtgaaccatcaccctaatcaagttttttggggtcgaggtgccgtaaagcactaaatcggaaccctaaagggagcccccgatttagagcttgacggggaaagccggcgaacgtggcgagaaaggaagggaagaaagcgaaaggagcgggcgctagggcgctggcaagtgtagcggtcacgctgcgcgtaaccaccacacccgccgcgcttaatgcgccgctacagggcgcgtccattcgccattcaggctgcgcaactgttgggaagggcgatcggtgcgggcctcttcgctattacgccagctggcgaaagggggatgtgctgcaaggcgattaagttgggtaacgccagggttttcccagtcacgacgttgtaaaacgacggccagtgaattgtaatacgactcactatagggcgaattgggcccgacgtcgcatgcattccatagccacacctttgcctatggcttcacaaccgaaggcaattcgagaggtcgcgcttatggaatcgactcgtataaagctgaagggaaagggagacgttccgagcgctcagatgcaatagtcgtccagctaatgtggattcaaaaacaaccccaacagtaatcttgaaaatttgaacggatcaatctgaacactcttgctccaggtcattcttctaacgcacatccccagagtctagagggagttgtgttgtgaacatcctaataaacaatgcaatggattcgggatatcttctgtctcgccccctactcgatgtcgagtaaaccgatcaccaactaacaatactcctccgcgttctgccattgactctcaaacagacatcgctatcaacggaacagcatattttagcttcttaggacaataaatattgataatgccggctctccctcggtatattaagcaatccattcatacactcattcatcaggttaattttatatatataatttgtctattcaaacaccgtaaattactggtaccatcatctcctccttttcaaatacacgtctatttgcattaatgaaattactcgccaattcgcagaacgtgtttgtcgaacagagccttagctcgggtccagacaggagcagtgtctcgctgaggaagctgcaggagagttaattaaaaggcgttgaaacagaatgagccagacagcaaggacaaggtggccaacagcaaggagtccaaaaagccctctattgacgagatccacgatgttattgctcatgaggtttccgagctcgatgctgggaagaagaagtgatttgtatataagaaataaatgagatatagtaaaggagtgcaagagaatggcaaggtggtcaaattctatattacttgcagtcactggttcctcgttgacatgaatgaagttaccgttggcatagctgatttaatatataactgtccaactaactctcacctagatataacccatgtgtgtgtttccaatcatcaatgcggccgctcatcgtgatgctcttcgtccagaagggtgggtgagaatagcctgcagcgccgccagcaccgggaccggcggcttgccgctaagaatgcgcgcgcggtcggccagcgtcagccgtccggcgtaaaaccgggcgatcagcccctcgggcaggccgtaaaagcgctgcattacgcgccagcgccgatcgccctcggccgccaggaacagcatgcggttaagcatgcggaaaaagccctgtttacgccacgctgcctgcgcaaagcggtgaatacgcggcgcgagcgcctcaggggagaagtccgcctctgcggcgagcgcgtccgccagcgtcgccgccagcggcagggagtagccggtcgtggggtgaaaaagcccggcgcgcaggccgacgcagggggcgcgatgatgccagaagcggtcgaaatcgcccgccagcgtaatcggcagcgcgccgcgctcttcgcgcagcagcgtctccagctgccagccctggcgggtggcgtagtcgcagatattctgccgcgcctgcgccgtcgccagcgaggcgtcgttaatatagtgggtatcttcaatcagcagacgcgtcggcgagagcggcagggtatagacgaagcgatagcccccctgctgatccacggccgcgtccatcagaatcggcccctccagctgatgcggctggctcaggcgccactcctgaccgacaaaagactgaaagccaatctgcagggcggcgtcgggctgatagccgcggccgtcaatgacggcgcgcgcgcgcagcacttcgccgctggcgagctgcacgtgatcggggccgctgctggcgacggtctggttaagccgcagcgcgtcgccgagcgtcgcgcgcagcacctcgtcaaagcgcgcggaagtgacgcaaaaatagccgctgttaagctggcgcgtcagcgcgggaaagcgtacctcgtagtgcggccagcggtgcgccaccagcggcgcaatccactgatgctgcgcggcgctgagatcctcttcgtgaaagcaccaggtgtgattgccaccggcgtgggcgtgggcatcaagcaccagcacgcgcagctgcggctggagcgctttcagccgcagcgccagcagcccgttcgccagaccggcgccgagcaacagcagatcatactgcgatgccatggccattgctgtagatatgtcttgtgtgtaagggggttggggtggttgtttgtgttcttgacttttgtgttagcaagggaagacgggcaaaaaagtgagtgtggttgggagggagagacgagccttatatataatgcttgtttgtgtttgtgcaagtggacgccgaaacgggcaggagccaaactaaacaaggcagacaatgcgagcttaattggattgcctgatgggcaggggttagggctcgatcaatgggggtgcgaagtgacaaaattgggaattaggttcgcaagcaaggctgacaagactttggcccaaacatttgtacgcggtggacaacaggagccacccatcgtctgtcacgggctagccggtcgtgcgtcctgtcaggctccacctaggctccatgccactccatacaatcccactagtgtaccgctaggccgcttttagctcccatctaagacccccccaaaacctccactgtacagtgcactgtactgtgtggcgatcaagggcaagggaaaaaaggcgcaaacatgcacgcatggaatgacgtaggtaaggcgttactagactgaaaagtggcacatttcggcgtgccaaagggtcctaggtgcgtttcgcgagctgggcgccaggccaagccgctccaaaacgcctctccgactccctccagcggcctccatatccccatccctctccacagcaatgttgttaagccttgcaaacgaaaaaatagaaaggctaataagcttccaatattgtggtgtacgctgcataacgcaacaatgagcgccaaacaacacacacacacagcacacagcagcattaaccatcgatgagcctaaaatgaacccgagtatatctcataaaattctcggtgagaggtctgtgactgtcagtacaaggtgccttcattatgccctcaaccttaccatacctcactgaatgtagtgtacctctaaaaatgaaatacagtgccaaaagccaaggcactgagctcgtctaacggacttgatatacaaccaattaaaacaaatgaaaagaaatacagttctttgtatcatttgtaacaattaccctgtacaaactaaggtattgaaatcccacaatattcccaaagtccacccctttccaaattgtcatgcctacaactcatataccaagcactaacctaccgtttaaacaagctaccaccacactcgttgggtgcagtcgccagcttaaagatatctatccacatcagccacaactcccttcctttaataaaccgactacacccttggctattgaggttatgagtgaatatactgtagacaagacactttcaagaagactgtttccaaaacgtaccactgtcctccactacaaacacacccaatctgcttcttctagtcaaggttgctacaccggtaaattataaatcatcatttcattagcagggcagggccctttttatagagtcttatacactagcggaccctgccggtagaccaacccgcaggcgcgtcagtttgctccttccatcaatgcgtcgtagaaacgacttactccttcttgagcagctccttgaccttgttggcaacaagtctccgacctcggaggtggaggaagagcctccgatatcggcggtagtgataccagcctcgacggactccttgacggcagcctcaacagcgtcaccggcgggcttcatgttaagagagaacttgagcatcatggcggcagacagaatggtggcaatggggttgaccttctgcttgccgagatcgggggcagatccgtgacagggctcgtacagaccgaacgcctcgttggtgtcgggcagagaagccagagaggcggagggcagcagacccagagaaccggggatgacggaggcctcgtcggagatgatatcgccaaacatgttggtggtgatgatgataccattcatcttggagggctgcttgatgaggatcatggcggccgagtcgatcagctggtggttgagctcgagctgggggaattcgtccttgaggactcgagtgacagtctttcgccaaagtcgagaggaggccagcacgttggccttgtcaagagaccacacgggaagaggggggttgtgctgaagggccaggaaggcggccattcgggcaattcgctcaacctcaggaacggagtaggtctcggtgtcggaagcgacgccagatccgtcatcctcctttcgctctccaaagtagatacctccgacgagctctcggacaatgatgaagtcggtgccctcaacgtttcggatgggggagagatcggcgagcttgggcgacagcagctggcagggtcgcaggttggcgtacaggttcaggtcctttcgcagcttgaggagaccctgctcgggtcgcacgtcggttcgtccgtcgggagtggtccatacggtgttggcagcgcctccgacagcaccgagcataatagagtcagcctttcggcagatgtcgagagtagcgtcggtgatgggctcgccctccttctcaatggcagctcctccaatgagtcggtcctcaaacacaaactcggtgccggaggcctcagcaacagacttgagcaccttgacggcctcggcaatcacctcggggccacagaagtcgccgccgagaagaacaatcttcttggagtcagtcttggtcttcttagtttcgggttccattgtggatgtgtgtggttgtatgtgtgatgtggtgtgtggagtgaaaatctgtggctggcaaacgctcttgtatatatacgcacttttgcccgtgctatgtggaagactaaacctccgaagattgtgactcaggtagtgcggtatcggctagggacccaaaccttgtcgatgccgatagcgctatcgaacgtaccccagccggccgggagtatgtcggaggggacatacgagatcgtcaagggtttgtggccaactggtaaataaatgatgactcaggcgacgacggaattcgacagcaactactcctttcaccaaccatgtgcattttagctcgaataacattcacaggcttggtgatctacatccatggtgtctggccgattaccgtggtgttttggcagtaacgagaatattgagtgaactcttcccatcaccaataaagactcatactacaatcacgagcgcttcagctgccactatagtgttggtgacacaatacccctcgatgctgggcattactgtagcaagagatattcatttcatggcgcattttccagtctacctgactttttagtgccgatttcttctccacattttacgctcagtgtgaaaagttggagtcgacttgcgccattatgtaagcagcgtgtactcctctgactgtccatatggtttgctccatctcaccctcatcgttttcattgttcacaggcggccacaaaaaaactgtcttctctccttctctcttcgccttagtctactcggaccagttttagtttagcttggcgccactggataaatgagacctcaggccttgtgatgaggaggtcacttatgaagcatgttaggaggtgcttgtatggatagagaagcacccaaaataataagaataataataaaacagggggcgttgtcatttcatatcgtgttttcaccatcaatacacctccaaacaatgcccttcatgtggccagccccaatattgtcctgtagttcaactctatgcagctcgtatcttattgagcaagtaaaactctgtcagccgatattgcccgacccgcgacaagggtcaacaaggtggtgtaaggccttcgcagaagtcaaaactgtgccaaacaaacatctagagtctctttggtgtttctcgcatatatttwatcggctgtcttacgtatttgcgcctcggtaccggactaatttcggatcatccccaatacgctttttcttcgcagctgtcaacagtgtccatgatctatccacctaaatgggtcatatgaggcgtataatttcgtggtgctgataataattcccatatatttgacacaaaacttccccccctagacatacatctcacaatctcacttcttgtgcttctgtcacacatctcctccagctgacttcaactcacacctctgccccagttggtctacagcggtataaggtttctccgcatagaggtgcaccactcctcccgatacttgtttgtgtgacttgtgggtcacgacatatatatctacacacattgcgccaccctttggttcttccagcacaacaaaaacacgacacgctaaccatgggaacggaccaaggaaaaaccttcacctgggaagagctggcggcccataacaccaaggacgacctactcttggccatccgcggcagggtgtacgatgtcacaaagttcttgagccgccatcctggtggagtggacactctcctgctcggagctggccgagatgttactccggtctttgagatgtatcacgcgtttggggctgcagatgccattatgaagaagtactatgtcggtacactggtctcgaatgagctgcccatcttcccggagccaacggtgttccacaaaaccatcaagacgagagtcgagggctactttacggatcggaacattgatcccaagaatagaccagagatctggggacgatacgctcttatctttggatccttgatcgcttcctactacgcgcagctctttgtgcctttcgttgtcgaacgcacatggcttcaggtggtgtttgcaatcatcatgggatttgcgtgcgcacaagtcggactcaaccctcttcatgatgcgtctcacttttcagtgacccacaaccccactgtctggaagattctgggagccacgcacgactttttcaacggagcatcgtacctggtgtggatgtaccaacatatgctcggccatcacccctacaccaacattgctggagcagatcccgacgtgtcgacgtctgagcccgatgttcgtcgtatcaagcccaaccaaaagtggtttgtcaaccacatcaaccagcacatgtttgttcctttcctgtacggactgctggcgttcaaggtgcgcattcaggacatcaacattttgtactttgtcaagaccaatgacgctattcgtgtcaatcccatctcgacatggcacactgtgatgttctggggcggcaaggctttctttgtctggtatcgcctgattgttcccctgcagtatctgcccctgggcaaggtgctgctcttgttcacggtcgcggacatggtgtcgtcttactggctggcgctgaccttccaggcgaaccacgttgttgaggaagttcagtggccgttgcctgacgagaacgggatcatccaaaaggactgggcagctatgcaggtcgagactacgcaggattacgcacacgattcgcacctctggaccagcatcactggcagcttgaactaccaggctgtgcaccatctgttccccaacgtgtcgcagcaccattatcccgatattctggccatcatcaagaacacctgcagcgagtacaaggttccataccttgtcaaggatacgttttggcaagcatttgcttcacatttggagcacttgcgtgttcttggactccgtcccaaggaagagtaggcggccgcaagtgtggatggggaagtgagtgcccggttctgtgtgcacaattggcaatccaagatggatggattcaacacagggatatagcgagctacgtggtggtgcgaggatatagcaacggatatttatgtttgacacttgagaatgtacgatacaagcactgtccaagtacaatactaaacatactgtacatactcatactcgtacccgggcaacggtttcacttgagtgcagtggctagtgctcttactcgtacagtgtgcaatactgcgtatcatagtctttgatgtatatcgtattcattcatgttagttgcgtacgttatagttggagcaagggagaaatgtagagtgtgaaagactcactatggtccgggcttatctcgaccaatagccaaagtctggagtttctgagagaaaaaggcaagatacgtatgtaacaaagcgacgcatggtacaataataccggaggcatgtatcatagagagttagtggttcgatgatggcactggtgcctggtatgactttatacggctgactacatatttgtcctcagacatacaattacagtcaagcacttacccttggacatctgtaggtaccccccggccaagacgatctcagcgtgtcgtatgtcggattggcgtagctccctcgctcgtcaattggctcccatctactttcttctgcttggctacacccagcatgtctgctatggctcgttttcgtgccttatctatcctcccagtattaccaactctaaatgacatgatgtgattgggtctacactttcatatcagagataaggagtagcacagttgcataaaaagcccaactctaatcagcttcttcctttcttgtaattagtacaaaggtgattagcgaaatctggaagcttagttggccctaaaaaaatcaaaaaaagcaaaaaacgaaaaacgaaaaaccacagttttgagaacagggaggtaacgaaggatcgtatatatatatatatatatatatacccacggatcccgagaccggcctttgattcttccctacaaccaaccattctcaccaccctaattcacaaccatggcctggccgacgatgatcctgctgttcctcgccaccttcctggggatggaggtcttcgcctgggcgatgcatcgctatgtcatgcacggcctgctgtggacctggcaccgcagccatcatgagccgcacgacgacgtgctggaaaggaacgacctgttcgcggtggtgttcgccgccccggccatcatcctcgtcgccttgggtctacatctgtggccttggatgctgccgatcggcctgggcgttacggcctatggactggtttatttcttctttcacgacgggctggtgcatcgccggttcccgacagggatcgcagggcgctcggcgttctggacgcgacgcattcaggcccaccggctgcatcacgcggtgcggacacgcgagggctgcgtatcgttcggcttcctttgggtgcggtcggcgcgcgcgctgaaggccgaactgtctcagaaacgcggctcatccagcaacggcgcctgaactgcggccgcatgagaagataaatatataaatacattgagatattaaatgcgctagattagagagcctcatactgctcggagagaagccaagacgagtactcaaaggggattacaccatccatatccacagacacaagctggggaaaggttctatatacactttccggaataccgtagtttccgatgttatcaatgggggcagccaggatttcaggcacttcggtgtctcggggtgaaatggcgttcttggcctccatcaagtcgtaccatgtcttcatttgcctgtcaaagtaaaacagaagcagatgaagaatgaacttgaagtgaaggaattt

SEQ ID NO: 89 - DNA, 20 bp, artificial sequence
  Primer GPAT_forward
actctgtcagccgatattgc

SEQ ID NO: 90 - DNA, 20 bp, artificial sequence
  Primer pex20_reverse
ctgcactcaagtgaaaccgt

SEQ ID NO: 91 - DNA, 12681 bp, artificial sequence
  Plasmid pYPS108
gtacgttatagttggagcaagggagaaatgtagagtgtgaaagactcactatggtccgggcttatctcgaccaatagccaaagtctggagtttctgagagaaaaaggcaagatacgtatgtaacaaagcgacgcatggtacaataataccggaggcatgtatcatagagagttagtggttcgatgatggcactggtgcctggtatgactttatacggctgactacatatttgtcctcagacatacaattacagtcaagcacttacccttggacatctgtaggtaccccccggccaagacgatctcagcgtgtcgtatgtcggattggcgtagctccctcgctcgtcaattggctcccatctactttcttctgcttggctacacccagcatgtctgctatggctcgttttcgtgccttatctatcctcccagtattaccaactctaaatgacatgatgtgattgggtctacactttcatatcagagataaggagtagcacagttgcataaaaagcccaactctaatcagcttcttcctttcttgtaattagtacaaaggtgattagcgaaatctggaagcttagttggccctaaaaaaatcaaaaaaagcaaaaaacgaaaaacgaaaaaccacagttttgagaacagggaggtaacgaaggatcgtatatatatatatatatatatatacccacggatcccgagaccggcctttgattcttccctacaaccaaccattctcaccaccctaattcacaaccatggcctggccgacgatgatcctgctgttcctcgccaccttcctggggatggaggtcttcgcctgggcgatgcatcgctatgtcatgcacggcctgctgtggacctggcaccgcagccatcatgagccgcacgacgacgtgctggaaaggaacgacctgttcgcggtggtgttcgccgccccggccatcatcctcgtcgccttgggtctacatctgtggccttggatgctgccgatcggcctgggcgttacggcctatggactggtttatttcttctttcacgacgggctggtgcatcgccggttcccgacagggatcgcagggcgctcggcgttctggacgcgacgcattcaggcccaccggctgcatcacgcggtgcggacacgcgagggctgcgtatcgttcggcttcctttgggtgcggtcggcgcgcgcgctgaaggccgaactgtctcagaaacgcggctcatccagcaacggcgcctgaactgcggccgcatgagaagataaatatataaatacattgagatattaaatgcgctagattagagagcctcatactgctcggagagaagccaagacgagtactcaaaggggattacaccatccatatccacagacacaagctggggaaaggttctatatacactttccggaataccgtagtttccgatgttatcaatgggggcagccaggatttcaggcacttcggtgtctcggggtgaaatggcgttcttggcctccatcaagtcgtaccatgtcttcatttgcctgtcaaagtaaaacagaagcagatgaagaatgaacttgaagtgaaggaatttaaatgtaacgaaactgaaatttgaccagatattgtgtccgcggtggagctccagcttttgttccctttagtgagggttaatttcgagcttggcgtaatcatggtcatagctgtttcctgtgtgaaattgttatccgctcacaagcttgacaatggatggtgtgtcgtatcaggctggggaacaattgtgcttaagtatgctgcagttgagtaagagtcatcgctccaccaaaataaagtttgccattagggttggagagagagatggtggctggaagaattaaatgacatcaagctgaggattgtgggtgtgcaataacacatgttaggggtgacctgtggctcgaaatctgataattattttgtaactttatgattattcttagattttttaatattcctctatataacacataagtagctgtcgtctagttgttcatagcctgactcctgcaatagattagtgcagagtgattttgtgcaattgagagccacggttgagtcaagtgactttgtgtgtgaagtcatcttacgtttcaagtctcacaggttactcaattggttggttgtctgccctttacagatatttacagtacctgagcgtaaagtcgttcatccacggaatgactgttcctgtcacgcagtcatgatcatggatgtggctggtcaggaaccattttggataggagacttagggattggactattattgaaaaaactgagccgaatatgatatagttctatttgaatgcagaacttctgatggtcaattcacttatttcaggcatatcggtcatggtggcagctgccacgatgttatctcgttggaaacctcggcgcgccagctgcattaatgaatcggccaacgcgcggggagaggcggtttgcgtattgggcgctcttccgcttcctcgctcactgactcgctgcgctcggtcgttcggctgcggcgagcggtatcagctcactcaaaggcggtaatacggttatccacagaatcaggggataacgcaggaaagaacatgtgagcaaaaggccagcaaaaggccaggaaccgtaaaaaggccgcgttgctggcgtttttccataggctccgcccccctgacgagcatcacaaaaatcgacgctcaagtcagaggtggcgaaacccgacaggactataaagataccaggcgtttccccctggaagctccctcgtgcgctctcctgttccgaccctgccgcttaccggatacctgtccgcctttctcccttcgggaagcgtggcgctttctcatagctcacgctgtaggtatctcagttcggtgtaggtcgttcgctccaagctgggctgtgtgcacgaaccccccgttcagcccgaccgctgcgccttatccggtaactatcgtcttgagtccaacccggtaagacacgacttatcgccactggcagcagccactggtaacaggattagcagagcgaggtatgtaggcggtgctacagagttcttgaagtggtggcctaactacggctacactagaagaacagtatttggtatctgcgctctgctgaagccagttaccttcggaaaaagagttggtagctcttgatccggcaaacaaaccaccgctggtagcggtggtttttttgtttgcaagcagcagattacgcgcagaaaaaaaggatctcaagaagatcctttgatcttttctacggggtctgacgctcagtggaacgaaaactcacgttaagggattttggtcatgagattatcaaaaaggatcttcacctagatccttttaaattaaaaatgaagttttaaatcaatctaaagtatatatgagtaaacttggtctgacagttaccaatgcttaatcagtgaggcacctatctcagcgatctgtctatttcgttcatccatagttgcctgactccccgtcgtgtagataactacgatacgggagggcttaccatctggccccagtgctgcaatgataccgcgagacccacgctcaccggctccagatttatcagcaataaaccagccagccggaagggccgagcgcagaagtggtcctgcaactttatccgcctccatccagtctattaattgttgccgggaagctagagtaagtagttcgccagttaatagtttgcgcaacgttgttgccattgctacaggcatcgtggtgtcacgctcgtcgtttggtatggcttcattcagctccggttcccaacgatcaaggcgagttacatgatcccccatgttgtgcaaaaaagcggttagctccttcggtcctccgatcgttgtcagaagtaagttggccgcagtgttatcactcatggttatggcagcactgcataattctcttactgtcatgccatccgtaagatgcttttctgtgactggtgagtactcaaccaagtcattctgagaatagtgtatgcggcgaccgagttgctcttgcccggcgtcaatacgggataataccgcgccacatagcagaactttaaaagtgctcatcattggaaaacgttcttcggggcgaaaactctcaaggatcttaccgctgttgagatccagttcgatgtaacccactcgtgcacccaactgatcttcagcatcttttactttcaccagcgtttctgggtgagcaaaaacaggaaggcaaaatgccgcaaaaaagggaataagggcgacacggaaatgttgaatactcatactcttcctttttcaatattattgaagcatttatcagggttattgtctcatgagcggatacatatttgaatgtatttagaaaaataaacaaataggggttccgcgcacatttccccgaaaagtgccacctgatgcggtgtgaaataccgcacagatgcgtaaggagaaaataccgcatcaggaaattgtaagcgttaatattttgttaaaattcgcgttaaatttttgttaaatcagctcattttttaaccaataggccgaaatcggcaaaatcccttataaatcaaaagaatagaccgagatagggttgagtgttgttccagtttggaacaagagtccactattaaagaacgtggactccaacgtcaaagggcgaaaaaccgtctatcagggcgatggcccactacgtgaaccatcaccctaatcaagttttttggggtcgaggtgccgtaaagcactaaatcggaaccctaaagggagcccccgatttagagcttgacggggaaagccggcgaacgtggcgagaaaggaagggaagaaagcgaaaggagcgggcgctagggcgctggcaagtgtagcggtcacgctgcgcgtaaccaccacacccgccgcgcttaatgcgccgctacagggcgcgtccattcgccattcaggctgcgcaactgttgggaagggcgatcggtgcgggcctcttcgctattacgccagctggcgaaagggggatgtgctgcaaggcgattaagttgggtaacgccagggttttcccagtcacgacgttgtaaaacgacggccagtgaattgtaatacgactcactatagggcgaattgggcccgacgtcgcatgcattccatagccacacctttgcctatggcttcacaaccgaaggcaattcgagaggtcgcgcttatggaatcgactcgtataaagctgaagggaaagggagacgttccgagcgctcagatgcaatagtcgtccagctaatgtggattcaaaaacaaccccaacagtaatcttgaaaatttgaacggatcaatctgaacactcttgctccaggtcattcttctaacgcacatccccagagtctagagggagttgtgttgtgaacatcctaataaacaatgcaatggattcgggatatcttctgtctcgccccctactcgatgtcgagtaaaccgatcaccaactaacaatactcctccgcgttctgccattgactctcaaacagacatcgctatcaacggaacagcatattttagcttcttaggacaataaatattgataatgccggctctccctcggtatattaagcaatccattcatacactcattcatcaggttaattttatatatataatttgtctattcaaacaccgtaaattactggtaccatcatctcctccttttcaaatacacgtctatttgcattaatgaaattactcgccaattcgcagaacgtgtttgtcgaacagagccttagctcgggtccagacaggagcagtgtctcgctgaggaagctgcaggagagttaattaaaaggcgttgaaacagaatgagccagacagcaaggacaaggtggccaacagcaaggagtccaaaaagccctctattgacgagatccacgatgttattgctcatgaggtttccgagctcgatgctgggaagaagaagtgatttgtatataagaaataaatgagatatagtaaaggagtgcaagagaatggcaaggtggtcaaattctatattacttgcagtcactggttcctcgttgacatgaatgaagttaccgttggcatagctgatttaatatataactgtccaactaactctcacctagatataacccatgtgtgtgtttccaatcatcaatgcggccgctcatcgtgatgctcttcgtccagaagggtgggtgagaatagcctgcagcgccgccagcaccgggaccggcggcttgccgctaagaatgcgcgcgcggtcggccagcgtcagccgtccggcgtaaaaccgggcgatcagcccctcgggcaggccgtaaaagcgctgcattacgcgccagcgccgatcgccctcggccgccaggaacagcatgcggttaagcatgcggaaaaagccctgtttacgccacgctgcctgcgcaaagcggtgaatacgcggcgcgagcgcctcaggggagaagtccgcctctgcggcgagcgcgtccgccagcgtcgccgccagcggcagggagtagccggtcgtggggtgaaaaagcccggcgcgcaggccgacgcagggggcgcgatgatgccagaagcggtcgaaatcgcccgccagcgtaatcggcagcgcgccgcgctcttcgcgcagcagcgtctccagctgccagccctggcgggtggcgtagtcgcagatattctgccgcgcctgcgccgtcgccagcgaggcgtcgttaatatagtgggtatcttcaatcagcagacgcgtcggcgagagcggcagggtatagacgaagcgatagcccccctgctgatccacggccgcgtccatcagaatcggcccctccagctgatgcggctggctcaggcgccactcctgaccgacaaaagactgaaagccaatctgcagggcggcgtcgggctgatagccgcggccgtcaatgacggcgcgcgcgcgcagcacttcgccgctggcgagctgcacgtgatcggggccgctgctggcgacggtctggttaagccgcagcgcgtcgccgagcgtcgcgcgcagcacctcgtcaaagcgcgcggaagtgacgcaaaaatagccgctgttaagctggcgcgtcagcgcgggaaagcgtacctcgtagtgcggccagcggtgcgccaccagcggcgcaatccactgatgctgcgcggcgctgagatcctcttcgtgaaagcaccaggtgtgattgccaccggcgtgggcgtgggcatcaagcaccagcacgcgcagctgcggctggagcgctttcagccgcagcgccagcagcccgttcgccagaccggcgccgagcaacagcagatcatactgcgatgccatggccattgctgtagatatgtcttgtgtgtaagggggttggggtggttgtttgtgttcttgacttttgtgttagcaagggaagacgggcaaaaaagtgagtgtggttgggagggagagacgagccttatatataatgcttgtttgtgtttgtgcaagtggacgccgaaacgggcaggagccaaactaaacaaggcagacaatgcgagcttaattggattgcctgatgggcaggggttagggctcgatcaatgggggtgcgaagtgacaaaattgggaattaggttcgcaagcaaggctgacaagactttggcccaaacatttgtacgcggtggacaacaggagccacccatcgtctgtcacgggctagccggtcgtgcgtcctgtcaggctccacctaggctccatgccactccatacaatcccactagtgtaccgctaggccgcttttagctcccatctaagacccccccaaaacctccactgtacagtgcactgtactgtgtggcgatcaagggcaagggaaaaaaggcgcaaacatgcacgcatggaatgacgtaggtaaggcgttactagactgaaaagtggcacatttcggcgtgccaaagggtcctaggtgcgtttcgcgagctgggcgccaggccaagccgctccaaaacgcctctccgactccctccagcggcctccatatccccatccctctccacagcaatgttgttaagccttgcaaacgaaaaaatagaaaggctaataagcttccaatattgtggtgtacgctgcataacgcaacaatgagcgccaaacaacacacacacacagcacacagcagcattaaccatcgatgagcctaaaatgaacccgagtatatctcataaaattctcggtgagaggtctgtgactgtcagtacaaggtgccttcattatgccctcaaccttaccatacctcactgaatgtagtgtacctctaaaaatgaaatacagtgccaaaagccaaggcactgagctcgtctaacggacttgatatacaaccaattaaaacaaatgaaaagaaatacagttctttgtatcatttgtaacaattaccctgtacaaactaaggtattgaaatcccacaatattcccaaagtccacccctttccaaattgtcatgcctacaactcatataccaagcactaacctaccgtttaaacaagctaccaccacactcgttgggtgcagtcgccagcttaaagatatctatccacatcagccacaactcccttcctttaataaaccgactacacccttggctattgaggttatgagtgaatatactgtagacaagacactttcaagaagactgtttccaaaacgtaccactgtcctccactacaaacacacccaatctgcttcttctagtcaaggttgctacaccggtaaattataaatcatcatttcattagcagggcagggccctttttatagagtcttatacactagcggaccctgccggtagaccaacccgcaggcgcgtcagtttgctccttccatcaatgcgtcgtagaaacgacttactccttcttgagcagctccttgaccttgttggcaacaagtctccgacctcggaggtggaggaagagcctccgatatcggcggtagtgataccagcctcgacggactccttgacggcagcctcaacagcgtcaccggcgggcttcatgttaagagagaacttgagcatcatggcggcagacagaatggtggcaatggggttgaccttctgcttgccgagatcgggggcagatccgtgacagggctcgtacagaccgaacgcctcgttggtgtcgggcagagaagccagagaggcggagggcagcagacccagagaaccggggatgacggaggcctcgtcggagatgatatcgccaaacatgttggtggtgatgatgataccattcatcttggagggctgcttgatgaggatcatggcggccgagtcgatcagctggtggttgagctcgagctgggggaattcgtccttgaggactcgagtgacagtctttcgccaaagtcgagaggaggccagcacgttggccttgtcaagagaccacacgggaagaggggggttgtgctgaagggccaggaaggcggccattcgggcaattcgctcaacctcaggaacggagtaggtctcggtgtcggaagcgacgccagatccgtcatcctcctttcgctctccaaagtagatacctccgacgagctctcggacaatgatgaagtcggtgccctcaacgtttcggatgggggagagatcggcgagcttgggcgacagcagctggcagggtcgcaggttggcgtacaggttcaggtcctttcgcagcttgaggagaccctgctcgggtcgcacgtcggttcgtccgtcgggagtggtccatacggtgttggcagcgcctccgacagcaccgagcataatagagtcagcctttcggcagatgtcgagagtagcgtcggtgatgggctcgccctccttctcaatggcagctcctccaatgagtcggtcctcaaacacaaactcggtgccggaggcctcagcaacagacttgagcaccttgacggcctcggcaatcacctcggggccacagaagtcgccgccgagaagaacaatcttcttggagtcagtcttggtcttcttagtttcgggttccattgtggatgtgtgtggttgtatgtgtgatgtggtgtgtggagtgaaaatctgtggctggcaaacgctcttgtatatatacgcacttttgcccgtgctatgtggaagactaaacctccgaagattgtgactcaggtagtgcggtatcggctagggacccaaaccttgtcgatgccgatagcgctatcgaacgtaccccagccggccgggagtatgtcggaggggacatacgagatcgtcaagggtttgtggccaactggtaaataaatgatgactcaggcgacgacggaattcgacagcaactactcctttcaccaaccatgtgcattttagctcgaataacattcacaggcttggtgatctacatccatggtgtctggccgattaccgtggtgttttggcagtaacgagaatattgagtgaactcttcccatcaccaataaagactcatactacaatcacgagcgcttcagctgccactatagtgttggtgacacaatacccctcgatgctgggcattactgtagcaagagatattcatttcatggcgcattttccagtctacctgactttttagtgccgatttcttctccacattttacgctcagtgtgaaaagttggagtcgacttgcgccattatgtaagcagcgtgtactcctctgactgtccatatggtttgctccatctcaccctcatcgttttcattgttcacaggcggccacaaaaaaactgtcttctctccttctctcttcgccttagtctactcggaccagttttagtttagcttggcgccactggataaatgagacctcaggccttgtgatgaggaggtcacttatgaagcatgttaggaggtgcttgtatggatagagaagcacccaaaataataagaataataataaaacagggggcgttgtcatttcatatcgtgttttcaccatcaatacacctccaaacaatgcccttcatgtggccagccccaatattgtcctgtagttcaactctatgcagctcgtatcttattgagcaagtaaaactctgtcagccgatattgcccgacccgcgacaagggtcaacaaggtggtgtaaggccttcgcagaagtcaaaactgtgccaaacaaacatctagagtctctttggtgtttctcgcatatatttwatcggctgtcttacgtatttgcgcctcggtaccggactaatttcggatcatccccaatacgctttttcttcgcagctgtcaacagtgtccatgatctatccacctaaatgggtcatatgaggcgtataatttcgtggtgctgataataattcccatatatttgacacaaaacttccccccctagacatacatctcacaatctcacttcttgtgcttctgtcacacatctcctccagctgacttcaactcacacctctgccccagttggtctacagcggtataaggtttctccgcatagaggtgcaccactcctcccgatacttgtttgtgtgacttgtgggtcacgacatatatatctacacacattgcgccaccctttggttcttccagcacaacaaaaacacgacacgctaaccatggggcaagcgaacaggatgcttaccgggccgcgatgcgctaagtgtcgcgccatgtccgccgtcacgccaatgtcacgggtcgtcccgaaccaggccctgatcggcctgacgctggctggcctgatcgccgcggcctggctgaccctgcacatctacggcgtctattttcatcgctggacgatctggagcgtcctgaccgttccgctgatcgtcgccggccagacctggctatccgtcggcctgttcatcgtcgcccacgacgccatgcacggctcgctggccccggcacgcccacggctgaacacggcgatcggcagcctggcgctggccctctacgccggatttcggttcacgcctttgaagaccgcacaccacgcccatcacgctgcgcccggtacggcggacgatcccgactttcacgccgacgccccgcgcgctttcctgccctggttctacggctttttccgcacctatttcggctggcgagaactggccgttctgacggtgctcgtggccgttgcggtgctgatcctcggcgcccgtatgcccaatcttctggtcttttgggccgcgcccgccctgctctcggcgctacagcttttcacattcggcacctggctgcctcataggcacaccgacgacgccttccccgacaaccacaacgcccgcaccagccccttcggcccggtcctgtcgttgctcacctgcttccacttcggccgccaccacgaacaccacctgaccccctggaagccctggtggagtttgttcagctagactgcggccgcaagtgtggatggggaagtgagtgcccggttctgtgtgcacaattggcaatccaagatggatggattcaacacagggatatagcgagctacgtggtggtgcgaggatatagcaacggatatttatgtttgacacttgagaatgtacgatacaagcactgtccaagtacaatactaaacatactgtacatactcatactcgtacccgggcaacggtttcacttgagtgcagtggctagtgctcttactcgtacagtgtgcaatactgcgtatcatagtctttgatgtatatcgtattcattcatgttagttgc

SEQ ID NO: 92 - DNA, 1161 bp, Pantoea stewartii DC413
atggcttcccagtacgacctgctccttctcggagctggtctggccaacggactcctggctctccgactgaaagccttgcagcctcaactgcgagtcttggttcttgatgctcacgcacacgctggtggcaaccatacctggtgcttccacgaggaagacctctctgctgcccagcatcagtggattgctcccttggtcgcacatcgttggcctcactacgaggttcgatttcccgctctgactagacagctcaactccggttacttctgtgtcacctcggcacgatttgacgaggttctgcgagccactctcggagatgctctgcgactcaaccagaccgtcgcatcctctggtccagaccacgttcagcttgccagcggcgaagtgctccgagctagagccgtcattgatggacgaggttaccaacccgacgctgcccttcagattggatttcagtccttcgttggtcaggagtggcgactgtctcagcctcatcagctcgaaggtcccattctgatggacgctgccgtggatcagcaaggaggctaccgtttcgtctatacacttcctctctcgcccacccgactgctcattgaggacactcactacatcaacgatgcctccttggctacagcacaggctcgacagaacatctgcgactacgccactcgacaaggatggcagctggagaccctgttgcgagaagagcgaggtgctctgcccatcactcttgcaggcgacttcgatcggttttggcatcaccgtgctccctgtgttggactgagagccggtctcttccatcctaccacaggttactcccttccactggctgccaccctcgctgacgccttggctgccgaggctgacttctctcccgaagcactcgctcctcgtattcaccgatttgcccaggctgcctggcgaaagcaaggctttttcagaatgttgaatcgaatgctgtttcttgctgccgagggagatcgaagatggcgagtcatgcagcgtttctacggtctgcccgagggcttgattgcccgattctatgctggacgactcacacttgccgacagagctcggattctcagcggaaagcctcccgttcctgtgctggctgccctccaggccatccttactcatccttctggtcgaagagcttcacga

SEQ ID NO: 93 - DNA, 780 bp, Brevundimonas vesicularis DC263
atgggacaggctaaccgaatgctcaccggtcctcgatgtgccaagtgccgagccatgtccgctgtcactcccatgtctcgagttgtgcctaaccaggctctgatcggactcacccttgccggtctcattgcagctgcctggctgactcttcacatctacggagtctacttccacagatggaccatctggtccgtccttacagttcccttgatcgtcgctggtcagacctggctctctgttggcctcttcattgtcgctcacgatgccatgcacggatcccttgctccagcacgacctagactgaacactgccattggttctctcgcacttgccctgtacgctggctttcgattcactcctctcaagacagcccaccatgctcaccatgccgcacctggtactgctgatgatcccgactttcatgccgatgctcctcgagcctttctgccctggttctatggcttctttcgaacctacttcggatggcgagagcttgctgtcctcaccgttcttgtcgccgttgctgtcctcattctgggtgcccgaatgccaaacttgctggtcttctgggctgcacctgctctccttagcgccttgcaactgttcacctttggcacttggctccctcatcgacacaccgacgatgcctttcccgacaatcacaacgctcgaacttctccctttggacctgttctgtcccttctgacctgtttccacttcggtcgacatcacgagcatcacctcactccctggaagccttggtggtctctgttctcctaa

SEQ ID NO: 94 - DNA, 483 bp, Brevundimonas vesicularis DC263
atggcttggcctaccatgatcctgctcttccttgctacctttctcggaatggaggtcttcgcctgggctatgcaccgatacgtcatgcacggtctgttgtggacttggcatcgttctcatcacgaaccccacgacgatgttctcgagcgaaacgacctgtttgccgtcgtgttcgctgcacctgccatcattctcgtcgctttgggtctccatctgtggccttggatgcttcccatcggactcggcgttactgcctacggactggtgtacttcttctttcacgacggtctcgtccatcgacggtttcccactggcattgctggtcgatctgccttctggacaagacgaatccaggctcacagactgcatcacgcagtgcgaacccgagagggatgcgtctcgttcggcttcctttgggttagatccgctcgagccctcaaggctgagctgtctcagaagcgaggttcctcttcgaacggagcc

SEQ ID NO: 95 - DNA, 8252 bp, artificial sequence
  Plasmid pYPS127
ctgggttagtttgtgtagagagtgtgtgttgctagcgactttcggattgtgtcattacacaaaacgcgtcgtctcgacactgatcttgtcgtggatactcacggctcggacatcgtcgccgacgatgacaccggactttcgcttaaggacgtcagtaacaggcattgtgtgatgtgtagtttagatttcgaatctgtggggaaagaaaggaaaaaagagactggcaaccgattgggagagccactgtttatatataccctagacaagccccccgcttgtaagatgttggtcaatgtaaaccagtattaaggttggcaagtgcaggagaagcaaggtgtgggtaccgagcaatggaaatgtgcggaaggcaaaaaaatgaggccacggcctattgtcggggctatatccagggggcgattgaagtacactaacatgacatgtgtccacagaccctcaatctggcctgatgagccaaatccatacgcgctttcgcagctctaaaggctataacaagtcacaccaccctgctcgacctcagcgccctcactttttgttaagacaaactgtacacgctgttccagcgttttctgcctgcacctggtgggacatttggtgcaacctaaagtgctcggaacctctgtggtgtccagatcagcgcagcagttccgaggtagttttgaggcccttagatgatgcaatggtgtcagtcgctggatcacgagtcttaatggcagtattcgttcttatttgtgccattgagccccgttatcctcgtatcttctaccccccatcccatccctttgttggtgcaaccctacccatttattgttgggtgcagcccaaccgacgtggagagcttggcttggccatataaaaaggcccccccctagtggcaatggcagaaagtcagctgtgagttgttgaatttgtcatctaggcggcctggccgtcttctccggggcaattgttcctctatagtagatctactatagaggaacatttaaatgtaacgaaactgaaatttgaccagatattgtgtccgcggtggagctccagcttttgttccctttagtgagggttaatttcgagcttggcgtaatcatggtcatagctgtttcctgtgtgaaattgttatccgctcacaagcttccacacaacgtacgccaccattctgtctgccgccatgatgctcaagttctctcttaacatgaagcccgccggtgacgctgttgaggctgccgtcaaggagtccgtcgaggctggtatcactaccgccgatatcggaggctcttcctccacctccgaggtcggagacttgttgccaacaaggtcaaggagctgctcaagaaggagtaagtcgtttctacgacgcattgatggaaggagcaaactgacgcgcctgcgggttggtctaccggcagggtccgctagtgtataagactctataaaaagggccctgccctgctaatgaaatgatgatttataatttaccggtgtagcaaccttgactagaagaagcagattgggtgtgtttgtagtggaggacagtggtacgttttggaaacagtcttcttgaaagtgtcttgtctacagtatattcactcataacctcaatagccaagggtgtagtcggtttattaaaggaagggagttgtggctgatgtggatagatatctttaagctggcgactgcacccaacgagtgtggtggtagcttgttactgtatattcggtaagatatattttgtggggttttagtggtgtttggtaggttagtgcttggtatatgagttgtaggcatgacaatttggaaaggggtggactttgggaatattgtgggatttcaataccttagtttgtacagggtaattgttacaaatgatacaaagaactgtatttcttttcatttgttttaattggttgtatatcaagtccgttagacgagctcagtgggcgcgccagctgcattaatgaatcggccaacgcgcggggagaggcggtttgcgtattgggcgctcttccgcttcctcgctcactgactcgctgcgctcggtcgttcggctgcggcgagcggtatcagctcactcaaaggcggtaatacggttatccacagaatcaggggataacgcaggaaagaacatgtgagcaaaaggccagcaaaaggccaggaaccgtaaaaaggccgcgttgctggcgtttttccataggctccgcccccctgacgagcatcacaaaaatcgacgctcaagtcagaggtggcgaaacccgacaggactataaagataccaggcgtttccccctggaagctccctcgtgcgctctcctgttccgaccctgccgcttaccggatacctgtccgcctttctcccttcgggaagcgtggcgctttctcatagctcacgctgtaggtatctcagttcggtgtaggtcgttcgctccaagctgggctgtgtgcacgaaccccccgttcagcccgaccgctgcgccttatccggtaactatcgtcttgagtccaacccggtaagacacgacttatcgccactggcagcagccactggtaacaggattagcagagcgaggtatgtaggcggtgctacagagttcttgaagtggtggcctaactacggctacactagaagaacagtatttggtatctgcgctctgctgaagccagttaccttcggaaaaagagttggtagctcttgatccggcaaacaaaccaccgctggtagcggtggtttttttgtttgcaagcagcagattacgcgcagaaaaaaaggatctcaagaagatcctttgatcttttctacggggtctgacgctcagtggaacgaaaactcacgttaagggattttggtcatgagattatcaaaaaggatcttcacctagatccttttaaattaaaaatgaagttttaaatcaatctaaagtatatatgagtaaacttggtctgacagttaccaatgcttaatcagtgaggcacctatctcagcgatctgtctatttcgttcatccatagttgcctgactccccgtcgtgtagataactacgatacgggagggcttaccatctggccccagtgctgcaatgataccgcgagacccacgctcaccggctccagatttatcagcaataaaccagccagccggaagggccgagcgcagaagtggtcctgcaactttatccgcctccatccagtctattaattgttgccgggaagctagagtaagtagttcgccagttaatagtttgcgcaacgttgttgccattgctacaggcatcgtggtgtcacgctcgtcgtttggtatggcttcattcagctccggttcccaacgatcaaggcgagttacatgatcccccatgttgtgcaaaaaagcggttagctccttcggtcctccgatcgttgtcagaagtaagttggccgcagtgttatcactcatggttatggcagcactgcataattctcttactgtcatgccatccgtaagatgcttttctgtgactggtgagtactcaaccaagtcattctgagaatagtgtatgcggcgaccgagttgctcttgcccggcgtcaatacgggataataccgcgccacatagcagaactttaaaagtgctcatcattggaaaacgttcttcggggcgaaaactctcaaggatcttaccgctgttgagatccagttcgatgtaacccactcgtgcacccaactgatcttcagcatcttttactttcaccagcgtttctgggtgagcaaaaacaggaaggcaaaatgccgcaaaaaagggaataagggcgacacggaaatgttgaatactcatactcttcctttttcaatattattgaagcatttatcagggttattgtctcatgagcggatacatatttgaatgtatttagaaaaataaacaaataggggttccgcgcacatttccccgaaaagtgccacctgatgcggtgtgaaataccgcacagatgcgtaaggagaaaataccgcatcaggaaattgtaagcgttaatattttgttaaaattcgcgttaaatttttgttaaatcagctcattttttaaccaataggccgaaatcggcaaaatcccttataaatcaaaagaatagaccgagatagggttgagtgttgttccagtttggaacaagagtccactattaaagaacgtggactccaacgtcaaagggcgaaaaaccgtctatcagggcgatggcccactacgtgaaccatcaccctaatcaagttttttggggtcgaggtgccgtaaagcactaaatcggaaccctaaagggagcccccgatttagagcttgacggggaaagccggcgaacgtggcgagaaaggaagggaagaaagcgaaaggagcgggcgctagggcgctggcaagtgtagcggtcacgctgcgcgtaaccaccacacccgccgcgcttaatgcgccgctacagggcgcgtccattcgccattcaggctgcgcaactgttgggaagggcgatcggtgcgggcctcttcgctattacgccagctggcgaaagggggatgtgctgcaaggcgattaagttgggtaacgccagggttttcccagtcacgacgttgtaaaacgacggccagtgaattgtaatacgactcactatagggcgaattgggcccgacgtcgcatgctatcggcatcgacaaggtttgggtccctagccgataccgcactacctgagtcacaatcttcggaggtttagtcttccacatagcacgggcaaaagtgcgtatatatacaagagcgtttgccagccacagattttcactccacacaccacatcacacatacaaccacacacatccacaatggaacccgaaactaagaagaccaagactgactccaagaagattgttcttctcggcggcgacttctgtggccccgaggtgattgccgaggccgtcaaggtgctcaagtctgttgctgaggcctccggcaccgagtttgtgtttgaggaccgactcattggaggagctgccattgagaaggagggcgagcccatcaccgacgctactctcgacatctgccgaaaggctgactctattatgctcggtgctgtcggaggcgctgccaacaccgtatggaccactcccgacggacgaaccgacgtgcgacccgagcagggtctcctcaagctgcgaaaggacctgaacctgtacgccaacctgcgaccctgccagctgctgtcgcccaagctcgccgatctctcccccatccgaaacgttgagggcaccgacttcatcattgtccgagagctcgtcggaggtatctactttggagagcgaaaggaggatgacggatctggcgtcgcttccgacaccgagacctactccgttaattaactttggccggaattcctttacctgcaggataacttcgtataatgtatgctatacgaagttatgatctctctcttgagcttttccataacaagttcttctgcctccaggaagtccatgggtggtttgatcatggttttggtgtagtggtagtgcagtggtggtattgtgactggggatgtagttgagaataagtcatacacaagtcagctttcttcgagcctcatataagtataagtagttcaacgtattagcactgtacccagcatctccgtatcgagaaacacaacaacatgccccattggacagatcatgcggatacacaggttgtgcagtatcatacatactcgatcagacaggtcgtctgaccatcatacaagctgaacaagcgctccatacttgcacgctctctatatacacagttaaattacatatccatagtctaacctctaacagttaatcttctggtaagcctcccagccagccttctggtatcgcttggcctcctcaataggatctcggttctggccgtacagacctcggccgacaattatgatatccgttccggtagacatgacatcctcaacagttcggtactgctgtccgagagcgtctcccttgtcgtcaagacccaccccgggggtcagaataagccagtcctcagagtcgcccttaggtcggttctgggcaatgaagccaaccacaaactcggggtcggatcgggcaagctcaatggtctgcttggagtactcgccagtggccagagagcccttgcaagacagctcggccagcatgagcagacctctggccagcttctcgttgggagaggggactaggaactccttgtactgggagttctcgtagtcagagacgtcctccttcttctgttcagagacagtttcctcggcaccagctcgcaggccagcaatgattccggttccgggtacaccgtgggcgttggtgatatcggaccactcggcgattcggtgacaccggtactggtgcttgacagtgttgccaatatctgcgaactttctgtcctcgaacaggaagaaaccgtgcttaagagcaagttccttgagggggagcacagtgccggcgtaggtgaagtcgtcaatgatgtcgatatgggttttgatcatgcacacataaggtccgaccttatcggcaagctcaatgagctccttggtggtggtaacatccagagaagcacacaggttggttttcttggctgccacgagcttgagcactcgagcggcaaaggcggacttgtggacgttagctcgagcttcgtaggagggcattttggtggtgaagaggagactgaaataaatttagtctgcagaactttttatcggaaccttatctggggcagtgaagtatatgttatggtaatagttacgagttagttgaacttatagatagactggactatacggctatcggtccaaattagaaagaacgtcaatggctctctgggcgtcgcctttgccgacaaaaatgtgatcatgatgaaagccagcaatgacgttgcagctgatattgttgtcggccaaccgcgccgaaaacgcagctgtcagacccacagcctccaacgaagaatgtatcgtcaaagtgatccaagcacactcatagttggagtcgtactccaaaggcggcaatgacgagtcagacagatactcgtcgacgcgataacttcgtataatgtatgctatacgaagttatcgtacgatagttagtagacaacaatcgatcgaggaagaggacaagcggctgcttcttaagtttgtgacatcagtatccaaggcaccattgcaaggattcaaggctttgaacccgtcatttgccattcgtaacgctggtagacaggttgatcggttccctacggcctccacctgtgtcaatcttctcaagctgcctgactatcaggacattgatcaacttcggaagaaacttttgtatgccattcgatcacatgctggtttcgatttgtcttagaggaacgcatatacagtaatcatagagaataaacgatattcatttattaaagtagatagttgaggtagaagttgtaaagagtgataaatagcggccgcttaggagaacagagaccaccaaggcttccagggagtgaggtgatgctcgtgatgtcgaccgaagtggaaacaggtcagaagggacagaacaggtccaaagggagaagttcgagcgttgtgattgtcgggaaaggcatcgtcggtgtgtcgatgagggagccaagtgccaaaggtgaacagttgcaaggcgctaaggagagcaggtgcagcccagaagaccagcaagtttggcattcgggcacccagaatgaggacagcaacggcgacaagaacggtgaggacagcaagctctcgccatccgaagtaggttcgaaagaagccatagaaccagggcagaaaggctcgaggagcatcggcatgaaagtcgggatcatcagcagtaccaggtgcggcatggtgagcatggtgggctgtcttgagaggagtgaatcgaaagccagcgtacagggcaagtgcgagagaaccaatggcagtgttcagtctaggtcgtgctggagcaagggatccgtgcatggcatcgtgagcgacaatgaagaggccaacagagagccaggtctgaccagcgacgatcaagggaactgtaaggacggaccagatggtccatctgtggaagtagactccgtagatgtgaagagtcagccaggcagctgcaatgagaccggcaagggtgagtccgatcagagcctggttaggcacaactcgagacatgggagtgacagcggacatggctcggcacttggcacatcgaggaccggtgagcattcggttagcctgtcccatggagag

SEQ ID NO: 96 - DNA, 7958 bp, artificial sequence
  Plasmid pYPS128
tactatagaggaacatttaaatgtaacgaaactgaaatttgaccagatattgtgtccgcggtggagctccagcttttgttccctttagtgagggttaatttcgagcttggcgtaatcatggtcatagctgtttcctgtgtgaaattgttatccgctcacaagcttccacacaacgtacgccaccattctgtctgccgccatgatgctcaagttctctcttaacatgaagcccgccggtgacgctgttgaggctgccgtcaaggagtccgtcgaggctggtatcactaccgccgatatcggaggctcttcctccacctccgaggtcggagacttgttgccaacaaggtcaaggagctgctcaagaaggagtaagtcgtttctacgacgcattgatggaaggagcaaactgacgcgcctgcgggttggtctaccggcagggtccgctagtgtataagactctataaaaagggccctgccctgctaatgaaatgatgatttataatttaccggtgtagcaaccttgactagaagaagcagattgggtgtgtttgtagtggaggacagtggtacgttttggaaacagtcttcttgaaagtgtcttgtctacagtatattcactcataacctcaatagccaagggtgtagtcggtttattaaaggaagggagttgtggctgatgtggatagatatctttaagctggcgactgcacccaacgagtgtggtggtagcttgttactgtatattcggtaagatatattttgtggggttttagtggtgtttggtaggttagtgcttggtatatgagttgtaggcatgacaatttggaaaggggtggactttgggaatattgtgggatttcaataccttagtttgtacagggtaattgttacaaatgatacaaagaactgtatttcttttcatttgttttaattggttgtatatcaagtccgttagacgagctcagtgggcgcgccagctgcattaatgaatcggccaacgcgcggggagaggcggtttgcgtattgggcgctcttccgcttcctcgctcactgactcgctgcgctcggtcgttcggctgcggcgagcggtatcagctcactcaaaggcggtaatacggttatccacagaatcaggggataacgcaggaaagaacatgtgagcaaaaggccagcaaaaggccaggaaccgtaaaaaggccgcgttgctggcgtttttccataggctccgcccccctgacgagcatcacaaaaatcgacgctcaagtcagaggtggcgaaacccgacaggactataaagataccaggcgtttccccctggaagctccctcgtgcgctctcctgttccgaccctgccgcttaccggatacctgtccgcctttctcccttcgggaagcgtggcgctttctcatagctcacgctgtaggtatctcagttcggtgtaggtcgttcgctccaagctgggctgtgtgcacgaaccccccgttcagcccgaccgctgcgccttatccggtaactatcgtcttgagtccaacccggtaagacacgacttatcgccactggcagcagccactggtaacaggattagcagagcgaggtatgtaggcggtgctacagagttcttgaagtggtggcctaactacggctacactagaagaacagtatttggtatctgcgctctgctgaagccagttaccttcggaaaaagagttggtagctcttgatccggcaaacaaaccaccgctggtagcggtggtttttttgtttgcaagcagcagattacgcgcagaaaaaaaggatctcaagaagatcctttgatcttttctacggggtctgacgctcagtggaacgaaaactcacgttaagggattttggtcatgagattatcaaaaaggatcttcacctagatccttttaaattaaaaatgaagttttaaatcaatctaaagtatatatgagtaaacttggtctgacagttaccaatgcttaatcagtgaggcacctatctcagcgatctgtctatttcgttcatccatagttgcctgactccccgtcgtgtagataactacgatacgggagggcttaccatctggccccagtgctgcaatgataccgcgagacccacgctcaccggctccagatttatcagcaataaaccagccagccggaagggccgagcgcagaagtggtcctgcaactttatccgcctccatccagtctattaattgttgccgggaagctagagtaagtagttcgccagttaatagtttgcgcaacgttgttgccattgctacaggcatcgtggtgtcacgctcgtcgtttggtatggcttcattcagctccggttcccaacgatcaaggcgagttacatgatcccccatgttgtgcaaaaaagcggttagctccttcggtcctccgatcgttgtcagaagtaagttggccgcagtgttatcactcatggttatggcagcactgcataattctcttactgtcatgccatccgtaagatgcttttctgtgactggtgagtactcaaccaagtcattctgagaatagtgtatgcggcgaccgagttgctcttgcccggcgtcaatacgggataataccgcgccacatagcagaactttaaaagtgctcatcattggaaaacgttcttcggggcgaaaactctcaaggatcttaccgctgttgagatccagttcgatgtaacccactcgtgcacccaactgatcttcagcatcttttactttcaccagcgtttctgggtgagcaaaaacaggaaggcaaaatgccgcaaaaaagggaataagggcgacacggaaatgttgaatactcatactcttcctttttcaatattattgaagcatttatcagggttattgtctcatgagcggatacatatttgaatgtatttagaaaaataaacaaataggggttccgcgcacatttccccgaaaagtgccacctgatgcggtgtgaaataccgcacagatgcgtaaggagaaaataccgcatcaggaaattgtaagcgttaatattttgttaaaattcgcgttaaatttttgttaaatcagctcattttttaaccaataggccgaaatcggcaaaatcccttataaatcaaaagaatagaccgagatagggttgagtgttgttccagtttggaacaagagtccactattaaagaacgtggactccaacgtcaaagggcgaaaaaccgtctatcagggcgatggcccactacgtgaaccatcaccctaatcaagttttttggggtcgaggtgccgtaaagcactaaatcggaaccctaaagggagcccccgatttagagcttgacggggaaagccggcgaacgtggcgagaaaggaagggaagaaagcgaaaggagcgggcgctagggcgctggcaagtgtagcggtcacgctgcgcgtaaccaccacacccgccgcgcttaatgcgccgctacagggcgcgtccattcgccattcaggctgcgcaactgttgggaagggcgatcggtgcgggcctcttcgctattacgccagctggcgaaagggggatgtgctgcaaggcgattaagttgggtaacgccagggttttcccagtcacgacgttgtaaaacgacggccagtgaattgtaatacgactcactatagggcgaattgggcccgacgtcgcatgctatcggcatcgacaaggtttgggtccctagccgataccgcactacctgagtcacaatcttcggaggtttagtcttccacatagcacgggcaaaagtgcgtatatatacaagagcgtttgccagccacagattttcactccacacaccacatcacacatacaaccacacacatccacaatggaacccgaaactaagaagaccaagactgactccaagaagattgttcttctcggcggcgacttctgtggccccgaggtgattgccgaggccgtcaaggtgctcaagtctgttgctgaggcctccggcaccgagtttgtgtttgaggaccgactcattggaggagctgccattgagaaggagggcgagcccatcaccgacgctactctcgacatctgccgaaaggctgactctattatgctcggtgctgtcggaggcgctgccaacaccgtatggaccactcccgacggacgaaccgacgtgcgacccgagcagggtctcctcaagctgcgaaaggacctgaacctgtacgccaacctgcgaccctgccagctgctgtcgcccaagctcgccgatctctcccccatccgaaacgttgagggcaccgacttcatcattgtccgagagctcgtcggaggtatctactttggagagcgaaaggaggatgacggatctggcgtcgcttccgacaccgagacctactccgttaattaactttggccggaattcctttacctgcaggataacttcgtataatgtatgctatacgaagttatgatctctctcttgagcttttccataacaagttcttctgcctccaggaagtccatgggtggtttgatcatggttttggtgtagtggtagtgcagtggtggtattgtgactggggatgtagttgagaataagtcatacacaagtcagctttcttcgagcctcatataagtataagtagttcaacgtattagcactgtacccagcatctccgtatcgagaaacacaacaacatgccccattggacagatcatgcggatacacaggttgtgcagtatcatacatactcgatcagacaggtcgtctgaccatcatacaagctgaacaagcgctccatacttgcacgctctctatatacacagttaaattacatatccatagtctaacctctaacagttaatcttctggtaagcctcccagccagccttctggtatcgcttggcctcctcaataggatctcggttctggccgtacagacctcggccgacaattatgatatccgttccggtagacatgacatcctcaacagttcggtactgctgtccgagagcgtctcccttgtcgtcaagacccaccccgggggtcagaataagccagtcctcagagtcgcccttaggtcggttctgggcaatgaagccaaccacaaactcggggtcggatcgggcaagctcaatggtctgcttggagtactcgccagtggccagagagcccttgcaagacagctcggccagcatgagcagacctctggccagcttctcgttgggagaggggactaggaactccttgtactgggagttctcgtagtcagagacgtcctccttcttctgttcagagacagtttcctcggcaccagctcgcaggccagcaatgattccggttccgggtacaccgtgggcgttggtgatatcggaccactcggcgattcggtgacaccggtactggtgcttgacagtgttgccaatatctgcgaactttctgtcctcgaacaggaagaaaccgtgcttaagagcaagttccttgagggggagcacagtgccggcgtaggtgaagtcgtcaatgatgtcgatatgggttttgatcatgcacacataaggtccgaccttatcggcaagctcaatgagctccttggtggtggtaacatccagagaagcacacaggttggttttcttggctgccacgagcttgagcactcgagcggcaaaggcggacttgtggacgttagctcgagcttcgtaggagggcattttggtggtgaagaggagactgaaataaatttagtctgcagaactttttatcggaaccttatctggggcagtgaagtatatgttatggtaatagttacgagttagttgaacttatagatagactggactatacggctatcggtccaaattagaaagaacgtcaatggctctctgggcgtcgcctttgccgacaaaaatgtgatcatgatgaaagccagcaatgacgttgcagctgatattgttgtcggccaaccgcgccgaaaacgcagctgtcagacccacagcctccaacgaagaatgtatcgtcaaagtgatccaagcacactcatagttggagtcgtactccaaaggcggcaatgacgagtcagacagatactcgtcgacgcgataacttcgtataatgtatgctatacgaagttatcgtacgatagttagtagacaacaatcgatcgaggaagaggacaagcggctgcttcttaagtttgtgacatcagtatccaaggcaccattgcaaggattcaaggctttgaacccgtcatttgccattcgtaacgctggtagacaggttgatcggttccctacggcctccacctgtgtcaatcttctcaagctgcctgactatcaggacattgatcaacttcggaagaaacttttgtatgccattcgatcacatgctggtttcgatttgtcttagaggaacgcatatacagtaatcatagagaataaacgatattcatttattaaagtagatagttgaggtagaagttgtaaagagtgataaatagcggccgcttaggctccgttcgaagaggaacctcgcttctgagacagctcagccttgagggctcgagcggatctaacccaaaggaagccgaacgagacgcatccctctcgggttcgcactgcgtgatgcagtctgtgagcctggattcgtcttgtccagaaggcagatcgaccagcaatgccagtgggaaaccgtcgatggacgagaccgtcgtgaaagaagaagtacaccagtccgtaggcagtaacgccgagtccgatgggaagcatccaaggccacagatggagacccaaagcgacgagaatgatggcaggtgcagcgaacacgacggcaaacaggtcgtttcgctcgagaacatcgtcgtggggttcgtgatgagaacgatgccaagtccacaacagaccgtgcatgacgtatcggtgcatagcccaggcgaagacctccattccgagaaaggtagcaaggaagagcaggatcatggtaggccaagccatggagagctgggttagtttgtgtagagagtgtgtgttgctagcgactttcggattgtgtcattacacaaaacgcgtcgtctcgacactgatcttgtcgtggatactcacggctcggacatcgtcgccgacgatgacaccggactttcgcttaaggacgtcagtaacaggcattgtgtgatgtgtagtttagatttcgaatctgtggggaaagaaaggaaaaaagagactggcaaccgattgggagagccactgtttatatataccctagacaagccccccgcttgtaagatgttggtcaatgtaaaccagtattaaggttggcaagtgcaggagaagcaaggtgtgggtaccgagcaatggaaatgtgcggaaggcaaaaaaatgaggccacggcctattgtcggggctatatccagggggcgattgaagtacactaacatgacatgtgtccacagaccctcaatctggcctgatgagccaaatccatacgcgctttcgcagctctaaaggctataacaagtcacaccaccctgctcgacctcagcgccctcactttttgttaagacaaactgtacacgctgttccagcgttttctgcctgcacctggtgggacatttggtgcaacctaaagtgctcggaacctctgtggtgtccagatcagcgcagcagttccgaggtagttttgaggcccttagatgatgcaatggtgtcagtcgctggatcacgagtcttaatggcagtattcgttcttatttgtgccattgagccccgttatcctcgtatcttctaccccccatcccatccctttgttggtgcaaccctacccatttattgttgggtgcagcccaaccgacgtggagagcttggcttggccatataaaaaggcccccccctagtggcaatggcagaaagtcagctgtgagttgttgaatttgtcatctaggcggcctggccgtcttctccggggcaattgttcctctatagtagatc

SEQ ID NO: 97 - DNA, 1350 bp, Euglena gracilis
  CDS (1)..(1350): synthetic delta-5 desaturase (codon-optimized for Yarrowia lipolytica)
atggctctctcccttactaccgagcagctgctcgagcgacccgacctggttgccatcgacggcattctctacgatctggaaggtcttgccaaggtccatcccggaggcgacttgatcctcgcttctggtgcctccgatgcttctcctctgttctactccatgcacccttacgtcaagcccgagaactcgaagctgcttcaacagttcgtgcgaggcaagcacgaccgaacctccaaggacattgtctacacctacgactctccctttgcacaggacgtcaagcgaactatgcgagaggtcatgaaaggtcggaactggtatgccacacctggattctggctgcgaaccgttggcatcattgctgtcaccgccttttgcgagtggcactgggctactaccggaatggtgctgtggggtctcttgactggattcatgcacatgcagatcggcctgtccattcagcacgatgcctctcatggtgccatcagcaaaaagccctgggtcaacgctctctttgcctacggcatcgacgtcattggatcgtccagatggatctggctgcagtctcacatcatgcgacatcacacctacaccaatcagcatggtctcgacctggatgccgagtccgcagaaccattccttgtgttccacaactaccctgctgccaacactgctcgaaagtggtttcaccgattccaggcctggtacatgtacctcgtgcttggagcctacggcgtttcgctggtgtacaaccctctctacatcttccgaatgcagcacaacgacaccattcccgagtctgtcacagccatgcgagagaacggctttctgcgacggtaccgaacccttgcattcgttatgcgagctttcttcatctttcgaaccgccttcttgccctggtatctcactggaacctccctgctcatcaccattcctctggtgcccactgctaccggtgccttcctcaccttctttttcatcttgtctcacaacttcgatggctcggagcgaatccccgacaagaactgcaaggtcaagagctccgagaaggacgttgaagccgatcagatcgactggtacagagctcaggtggagacctcttccacctacggtggacccattgccatgttctttactggcggtctcaacttccagatcgagcatcacctctttcctcgaatgtcgtcttggcactatcccttcgtgcagcaagctgtccgagagtgttgcgaacgacacggagttcggtacgtcttctaccctaccattgtgggcaacatcatttccaccctcaagtacatgcacaaagtcggtgtggttcactgtgtcaaggacgctcaggattcctaa

SEQ ID NO: 98 - protein, 449 aa, Euglena gracilis
MALSLTTEQLLERPDLVAIDGILYDLEGLAKVHPGGDLILASGASDASPLFYSMHPYVKPENSKLLQQFVRGKHDRTSKDIVYTYDSPFAQDVKRTMREVMKGRNWYATPGFWLRTVGIIAVTAFCEWHWATTGMVLWGLLTGFMHMQIGLSIQHDASHGAISKKPWVNALFAYGIDVIGSSRWIWLQSHIMRHHTYTNQHGLDLDAESAEPFLVFHNYPAANTARKWFHRFQAWYMYLVLGAYGVSLVYNPLYIFRMQHNDTIPESVTAMRENGFLRRYRTLAFVMRAFFIFRTAFLPWYLTGTSLLITIPLVPTATGAFLTFFFILSHNFDGSERIPDKNCKVKSSEKDVEADQIDWYRAQVETSSTYGGPIAMFFTGGLNFQIEHHLFPRMSSWHYPFVQQAVRECCERHGVRYVFYPTIVGNIISTLKYMHKVGVVHCVKDAQDS

SEQ ID NO: 99 - DNA, 1392 bp, Peridinium sp. CCMP626
  CDS (1)..(1392): synthetic delta-5 desaturase (codon-optimized for Yarrowia lipolytica)
atggctcccgacgccgacaagctgcgacagcgaaaggctcagtccatccaggacactgccgattctcaggctaccgagctcaagattggcaccctgaagggtctccaaggcaccgagatcgtcattgatggcgacatctacgacatcaaagacttcgatcaccctggaggcgaatccatcatgacctttggtggcaacgacgttactgccacctacaagatgattcatccctaccactcgaagcatcacctggagaagatgaaaaaggtcggtcgagtgcccgactacacctccgagtacaagttcgatactcccttcgaacgagagatcaaacaggaggtcttcaagattgtgcgaagaggtcgagagtttggaacacctggctacttctttcgagccttctgctacatcggtctcttcttttacctgcagtatctctgggttaccactcctaccactttcgcccttgctatcttctacggtgtgtctcaggccttcattggcctgaacgtccagcacgacgccaaccacggagctgcctccaaaaagccctggatcaacaatttgctcggcctgggtgccgactttatcggaggctccaagtggctctggatgaaccagcactggacccatcacacttacaccaaccatcacgagaaggatcccgacgccctgggtgcagagcctatgctgctcttcaacgactatcccttgggtcaccccaagcgaaccctcattcatcacttccaagccttctactatctgtttgtccttgctggctactgggtgtcttcggtgttcaaccctcagatcctggacctccagcaccgaggtgcccaggctgtcggcatgaagatggagaacgactacattgccaagtctcgaaagtacgctatcttcctgcgactcctgtacatctacaccaacattgtggctcccatccagaaccaaggcttttcgctcaccgtcgttgctcacattcttactatgggtgtcgcctccagcctgaccctcgctactctgttcgccctctcccacaacttcgagaacgcagatcgggatcccacctacgaggctcgaaagggaggcgagcctgtctgttggttcaagtcgcaggtggaaacctcctctacttacggtggcttcatttccggttgccttacaggcggactcaactttcaggtcgagcatcacctgtttcctcgaatgtcctctgcctggtacccctacatcgctcctaccgttcgagaggtctgcaaaaagcacggcgtcaagtacgcctactatccctgggtgtggcagaacctcatctcgaccgtcaagtacctgcatcagtccggaactggctcgaactggaagaacggtgccaatccctactctggcaagctgtaa

SEQ ID NO: 100 - protein, 463 aa, Peridinium sp. CCMP626
MAPDADKLRQRKAQSIQDTADSQATELKIGTLKGLQGTEIVIDGDIYDIKDFDHPGGESIMTFGGNDVTATYKMIHPYHSKHHLEKMKKVGRVPDYTSEYKFDTPFEREIKQEVFKIVRRGREFGTPGYFFRAFCYIGLFFYLQYLWVTTPTTFALAIFYGVSQAFIGLNVQHDANHGAASKKPWINNLLGLGADFIGGSKWLWMNQHWTHHTYTNHHEKDPDALGAEPMLLFNDYPLGHPKRTLIHHFQAFYYLFVLAGYWVSSVFNPQILDLQHRGAQAVGMKMENDYIAKSRKYAIFLRLLYIYTNIVAPIQNQGFSLTVVAHILTMGVASSLTLATLFALSHNFENADRDPTYEARKGGEPVCWFKSQVETSSTYGGFISGCLTGGLNFQVEHHLFPRMSSAWYPYIAPTVREVCKKHGVKYAYYPWVWQNLISTVKYLHQSGTGSNWKNGANPYSGKL

SEQ ID NO: 101 - DNA, 1350 bp, Euglena gracilis
  CDS (1)..(1350): delta-5 desaturase
atggctctcagtcttaccacagaacagctgttagaacgccctgatttggttgcgattgatggcatcctctacgaccttgaagggcttgccaaagttcatccaggaggagatttgattctcgcttctggtgcctctgatgcctcccctctcttttattcaatgcatccatacgtcaaaccggagaattccaaattgcttcaacagttcgtccgagggaagcatgaccgcacctcgaaggacattgtctacacgtatgattctcccttcgcacaagacgttaagcggacaatgcgcgaggtgatgaaagggaggaactggtacgcaacccctggcttctggctgcgcaccgttgggatcatcgccgtgacggccttttgcgagtggcactgggctaccacggggatggtgctgtggggcctgttgactggattcatgcacatgcagatcggcttatccatccagcatgatgcgtcccacggggccatcagcaagaagccttgggtcaacgccctcttcgcctacggcattgacgtcatcggatcgtcccggtggatttggctgcagtcgcacatcatgcggcaccacacctacaccaaccagcacggcctcgacctggatgcggagtcggcagagccgttcctggtgttccacaactaccccgccgcaaacaccgcccgaaagtggttccaccgcttccaagcttggtacatgtaccttgtgctgggggcatacggggtatcgctggtgtacaacccgctctacattttccggatgcagcacaatgacaccatcccagagtctgtcacggccatgcgggagaatggctttctgcggcgctaccgcacacttgcattcgtgatgcgagctttcttcatcttccggaccgcattcttgccctggtacctcactgggacctcattgctgatcaccattcctctggtgcccactgcaactggtgccttcttgacgttcttcttcattttgtcccacaattttgatggctccgaacggatccccgacaagaactgcaaggttaagagctctgagaaggacgttgaggctgaccaaattgactggtatcgggcgcaggtggagacgtcctccacatacggtggccccatcgccatgttcttcactggcggtctcaatttccagatcgagcaccacctctttccccggatgtcgtcttggcactaccccttcgtccagcaggcggtccgggagtgttgcgaacgccatggagtgcgatatgttttctaccctaccatcgtcggcaacatcatctccaccctgaagtacatgcataaggtgggtgtcgtccactgcgtgaaggacgcacaggattcctga

SEQ ID NO: 102 - protein, 449 aa, Euglena gracilis; identical to SEQ ID NO: 98

SEQ ID NO: 103 - DNA, 1080 bp, Pythium aphanidermatum
  CDS (1)..(1080): delta-17 desaturase
atggcttcttccactgttgctgcgccgtacgagttcccgacgctgacggagatcaagcgctcgctgccagcgcactgctttgaggcctcggtcccgtggtcgctctactacaccgtgcgcgcgctgggcatcgccggctcgctcgcgctcggcctctactacgcgcgcgcgctcgcgatcgtgcaggagtttgccctgctggatgcggtgctctgcacggggtacattctgctgcagggcatcgtattctgggggttcttcaccatcggccatgactgcggccacggcgcgttctcgcgttcgcacctgctcaacttcagcgtcggcacgctcattcactcgatcatcctcacgccgtacgagtcatggaagatctcgcaccgccaccaccacaagaacacgggcaacatcgacaaggacgagattttctacccgcagcgcgaggccgactcgcacccactgtcccgacacatggtgatctcgctcggctcggcctggttcgcgtacctcgttgcgggcttccctcctcgcaaggtgaaccacttcaacccttgggaaccgttgtacctgcgccgcatgtctgccgtcatcatctcactcggctcgctcgtggcgttcgcgggcttgtatgcgtatctcacctacgtctatggccttaagaccatggcgctgtactacttcgcccctctctttgggttcgccacgatgctcgtggtcactacctttttgcaccacaatgacgaggaaacgccatggtacgccgactcggagtggacgtacgtcaagggcaacctctcgtccgtggaccgctcgtacggcgcgctcatcgacaacctgagccacaacatcggcacgcaccagatccaccacctgtttccgatcatcccgcactacaagctgaacgaggcgacggcagcgttcgcgcaggcgttcccggagctcgtgcgcaagagcgcgtcgccgatcatcccgacgttcatccgcatcgggctcatgtacgccaagtacggcgtcgtggacaaggacgccaagatgtttacgctcaaggaggccaaggccgccaagaccaaggccaactag

SEQ ID NO: 104 - protein, 359 aa, Pythium aphanidermatum
MASSTVAAPYEFPTLTEIKRSLPAHCFEASVPWSLYYTVRALGIAGSLALGLYYARALAIVQEFALLDAVLCTGYILLQGIVFWGFFTIGHDCGHGAFSRSHLLNFSVGTLIHSIILTPYESWKISHRHHHKNTGNIDKDEIFYPQREADSHPLSRHMVISLGSAWFAYLVAGFPPRKVNHFNPWEPLYLRRMSAVIISLGSLVAFAGLYAYLTYVYGLKTMALYYFAPLFGFATMLVVTTFLHHNDEETPWYADSEWTYVKGNLSSVDRSYGALIDNLSHNIGTHQIHHLFPIIPHYKLNEATAAFAQAFPELVRKSASPIIPTFIRIGLMYAKYGVVDKDAKMFTLKEAKAAKTKAN

SEQ ID NO: 105 - DNA, 1080 bp, Pythium aphanidermatum
  CDS (1)..(1080): synthetic delta-17 desaturase (codon-optimized for Yarrowia lipolytica)
atggcttcctctaccgttgccgctccctacgagttccctactctcaccgagatcaagcgatccctgcctgcccactgcttcgaagcctctgttccctggtccctctactataccgtgcgagctctgggcattgccggttcccttgctctcggactgtactatgctcgagcccttgctatcgtgcaggagtttgcactgctcgatgccgtcctttgcactggctacattctgctccagggtatcgtgttctggggattctttaccatcggtcacgactgtggacatggtgccttctcgcgatcccacctgctcaacttctctgttggcacactcattcactccatcattctgactccctacgagtcgtggaagatcagccatcgacaccatcacaagaacaccggcaacatcgacaaggatgagatcttctaccctcagcgagaagccgactctcatcccctgtcccgacacatggtcatctcccttggttcggcttggtttgcctacctcgttgctggatttcctccccgaaaggtcaaccacttcaatccctgggagcctctctacctgcgaagaatgtctgccgtcatcatttccctcggctctctcgtggcctttgctggtctgtacgcctaccttacctacgtctacggcctcaagaccatggctctgtattacttcgcacctctctttggattcgccaccatgctggttgtcactaccttcctccatcacaacgacgaggaaactccctggtacgccgattcggagtggacctatgtcaagggcaacttgtcctctgtggaccgaagctacggagccctcatcgacaacctgtcccacaacattggtacacatcagatccaccatctgtttcccatcattcctcactacaagctcaacgaggccactgctgccttcgctcaggcctttcccgaactggtgcgaaagtcggcttctcccatcattcccaccttcatccgaattggtcttatgtacgccaagtacggcgtggtcgacaaggatgccaagatgtttaccctcaaggaggccaaggctgccaagaccaaagccaactaa

SEQ ID NO: 106 - protein, 359 aa, Pythium aphanidermatum; identical to SEQ ID NO: 104

SEQ ID NO: 107 - DNA, 9570 bp, Artificial Sequence
  Plasmid pY117
ggccgccaccgcggcccgagattccggcctcttcggccgccaagcgacccgggtggacgtctagaggtacctagcaattaacagatagtttgccggtgataattctcttaacctcccacactcctttgacataacgatttatgtaacgaaactgaaatttgaccagatattgtgtccgcggtggagctccagcttttgttccctttagtgagggtttaaacgagcttggcgtaatcatggtcatagctgtttcctgtgtgaaattgttatccgctcacaattccacacaacgtacgagccggaagcataaagtgtaaagcctggggtgcctaatgagtgagctaactcacattaattgcgttgcgctcactgcccgctttccagtcgggaaacctgtcgtgccagctgcattaatgaatcggccaacgcgcggggagaggcggtttgcgtattgggcgctcttccgcttcctcgctcactgactcgctgcgctcggtcgttcggctgcggcgagcggtatcagctcactcaaaggcggtaatacggttatccacagaatcaggggataacgcaggaaagaacatgtgagcaaaaggccagcaaaaggccaggaaccgtaaaaaggccgcgttgctggcgtttttccataggctccgcccccctgacgagcatcacaaaaatcgacgctcaagtcagaggtggcgaaacccgacaggactataaagataccaggcgtttccccctggaagctccctcgtgcgctctcctgttccgaccctgccgcttaccggatacctgtccgcctttctcccttcgggaagcgtggcgctttctcatagctcacgctgtaggtatctcagttcggtgtaggtcgttcgctccaagctgggctgtgtgcacgaaccccccgttcagcccgaccgctgcgccttatccggtaactatcgtcttgagtccaacccggtaagacacgacttatcgccactggcagcagccactggtaacaggattagcagagcgaggtatgtaggcggtgctacagagttcttgaagtggtggcctaactacggctacactagaaggacagtatttggtatctgcgctctgctgaagccagttaccttcggaaaaagagttggtagctcttgatccggcaaacaaaccaccgctggtagcggtggtttttttgtttgcaagcagcagattacgcgcagaaaaaaaggatctcaagaagatcctttgatcttttctacggggtctgacgctcagtggaacgaaaactcacgttaagggattttggtcatgagattatcaaaaaggatcttcacctagatccttttaaattaaaaatgaagttttaaatcaatctaaagtatatatgagtaaacttggtctgacagttaccaatgcttaatcagtgaggcacctatctcagcgatctgtctatttcgttcatccatagttgcctgactccccgtcgtgtagataactacgatacgggagggcttaccatctggccccagtgctgcaatgataccgcgagacccacgctcaccggctccagatttatcagcaataaaccagccagccggaagggccgagcgcagaagtggtcctgcaactttatccgcctccatccagtctattaattgttgccgggaagctagagtaagtagttcgccagttaatagtttgcgcaacgttgttgccattgctacaggcatcgtggtgtcacgctcgtcgtttggtatggcttcattcagctccggttcccaacgatcaaggcgagttacatgatcccccatgttgtgcaaaaaagcggttagctccttcggtcctccgatcgttgtcagaagtaagttggccgcagtgttatcactcatggttatggcagcactgcataattctcttactgtcatgccatccgtaagatgcttttctgtgactggtgagtactcaaccaagtcattctgagaatagtgtatgcggcgaccgagttgctcttgcccggcgtcaatacgggataataccgcgccacatagcagaactttaaaagtgctcatcattggaaaacgttcttcggggcgaaaactctcaaggatcttaccgctgttgagatccagttcgatgtaacccactcgtgcacccaactgatcttcagcatcttttactttcaccagcgtttctgggtgagcaaaaacaggaaggcaaaatgccgcaaaaaagggaataagggcgacacggaaatgttgaatactcatactcttcctttttcaatattattgaagcatttatcagggttattgtctcatgagcggatacatatttgaatgtatttagaaaaataaacaaataggggttccgcgcacatttccccgaaaagtgccacctgacgcgccctgtagcggcgcattaagcgcggcgggtgtggtggttacgcgcagcgtgaccgctacacttgccagcgccctagcgcccgctcctttcgctttcttcccttcctttctcgccacgttcgccggctttccccgtcaagctctaaatcgggggctccctttagggttccgatttagtgctttacggcacctcgaccccaaaaaacttgattagggtgatggttcacgtagtgggccatcgccctgatagacggtttttcgccctttgacgttggagtccacgttctttaatagtggactcttgttccaaactggaacaacactcaaccctatctcggtctattcttttgatttataagggattttgccgatttcggcctattggttaaaaaatgagctgatttaacaaaaatttaacgcgaattttaacaaaatattaacgcttacaatttccattcgccattcaggctgcgcaactgttgggaagggcgatcggtgcgggcctcttcgctattacgccagctggcgaaagggggatgtgctgcaaggcgattaagttgggtaacgccagggttttcccagtcacgacgttgtaaaacgacggccagtgaattgtaatacgactcactatagggcgaattgggtaccgggccccccctcgaggtcgatggtgtcgataagcttgatatcgaattcatgtcacacaaaccgatcttcgcctcaaggaaacctaattctacatccgagagactgccgagatccagtctacactgattaattttcgggccaataatttaaaaaaatcgtgttatataatattatatgtattatatatatacatcatgatgatactgacagtcatgtcccattgctaaatagacagactccatctgccgcctccaactgatgttctcaatatttaaggggtcatctcgcattgtttaataataaacagactccatctaccgcctccaaatgatgttctcaaaatatattgtatgaacttatttttattacttagtattattagacaacttacttgctttatgaaaaacacttcctatttaggaaacaatttataatggcagttcgttcatttaacaatttatgtagaataaatgttataaatgcgtatgggaaatcttaaatatggatagcataaatgatatctgcattgcctaattcgaaatcaacagcaacgaaaaaaatcccttgtacaacataaatagtcatcgagaaatatcaactatcaaagaacagctattcacacgttactattgagattattattggacgagaatcacacactcaactgtctttctctcttctagaaatacaggtacaagtatgtactattctcattgttcatacttctagtcatttcatcccacatattccttggatttctctccaatgaatgacattctatcttgcaaattcaacaattataataagatataccaaagtagcggtatagtggcaatcaaaaagcttctctggtgtgcttctcgtatttatttttattctaatgatccattaaaggtatatatttatttcttgttatataatccttttgtttattacatgggctggatacataaaggtattttgatttaattttttgcttaaattcaatcccccctcgttcagtgtcaactgtaatggtaggaaattaccatacttttgaagaagcaaaaaaaatgaaagaaaaaaaaaatcgtatttccaggttagacgttccgcagaatctagaatgcggtatgcggtacattgttcttcgaacgtaaaagttgcgctccctgagatattgtacatttttgcttttacaagtacaagtacatcgtacaactatgtactactgttgatgcatccacaacagtttgttttgtttttttttgttttttttttttctaatgattcattaccgctatgtatacctacttgtacttgtagtaagccgggttattggcgttcaattaatcatagacttatgaatctgcacggtgtgcgctgcgagttacttttagcttatgcatgctacttgggtgtaatattgggatctgttcggaaatcaacggatgctcaaccgatttcgacagtaattaattaattccctagtcccagtgtacacccgccgatatcgcttaccctgcagccggattaaggttggcaatttttcacgtccttgtctccgcaattactcaccgggtggtttataagattgcaagcgtcttgatttgtctctgtatactaacatgcaatcgcgactcgcccgacgggccactaacctggccagaatctccagatccaagtattctcttggtctgcgatatgtttccaacacaaaagcccctgctgcccagccggcaactgctgagtgagtattccttgccataaacgacccagaaccactgtatagtgtttggaagcactagtcagaagaccagcgaaaacaggtggaaaaaactgagacgaaaagcaacgaccagaaatgtaatgtgtggaaaagcgacacacacagagcagataaagaggtgacaaataacgacaaatgaaatatcagtatcttcccacaatcactacctctcagctgtctgaaggtgcggctgatatatccatcccacgtctaacgtatggagtgtgatagaatatgacgacacaagcatgagaactcgctctctatccaaccaccgaaacactgtcactacagccgttcttgttgctccattcgcttttgtgattccatgccttctctggtgactgacaacattccttccttttctccagccctgttgttatctgctcatgacctacggccactctctatcgcatactaacatagacgatcccagcccgctccccacttccagggcaccgttggcaagcctcctatcctcaagaaggctgaggctgccaacgctgacatggacgagtccttcatcggaatgtctggaggagagatcttccacgagatgatgctgcgacacaacgtcgacactgtcttcggttaccccggtggagccattctccccgtctttgacgccattcacaactctgagtacttcaactttgtgctccctcgacacgagcagggtgccggccacatggccgagggctacgctcgagcctctggtaagcccggtgtcgttctcgtcacctctggccccggtgccaccaacgtcatcacccccatgcaggacgctctttccgatggtacccccatggttgtcttcaccggtcaggtcctgacctccgttatcggcactgacgccttccaggaggccgatgttgtcggcatctcccgatcttgcaccaagtggaacgtcatggtcaagaacgttgctgagctcccccgacgaatcaacgaggcctttgagattgctacttccggccgacccggtcccgttctcgtcgatctgcccaaggatgttactgctgccatcctgcgagagcccatccccaccaagtccaccattccctcgcattctctgaccaacctcacctctgccgccgccaccgagttccagaagcaggctatccagcgagccgccaacctcatcaaccagtccaagaagcccgtcctttacgtcggacagggtatccttggctccgaggagggtcctaagctgcttaaggagctggctgagaaggccgagattcccgtcaccactactctgcagggtcttggtgcctttgacgagcgagaccccaagtctctgcacatgctcggtatgcacggttccggctacgccaacatggccatgcagaacgctgactgtatcattgctctcggcgcccgatttgatgaccgagttaccggctccatccccaagtttgcccccgaggctcgagccgctgcccttgagggtcgaggtggtattgttcactttgagatccaggccaagaacatcaacaaggttgttcaggccaccgaagccgttgagggagacgttaccgagtctgtccgacagctcatccccctcatcaacaaggtctctgccgctgagcgagctccctggactgagactatccagtcctggaagcagcagttccccttcctcttcgaggctgaaggtgaggatggtgttatcaagccccagtccgtcattgctctgctctctgacctgacagagaacaacaaggacaagaccatcatcaccaccggtgttggtcagcatcagatgtggactgcccagcatttccgatggcgacaccctcgaaccatgatcacttctggtggtcttggaactatgggttacggcctgcccgccgctatcggcgccaaggttgcccgacctgactgcgacgtcattgacatcgatggtgacgcttctttcaacatgactctgaccgagctgtccaccgccgttcagttcaacattggcgtcaaggctattgtcctcaacaacgaggaacagggtatggtcacccagctgcagtctctcttctacgagaaccgatactgccacactcatcagaagaaccccgacttcatgaagctggccgagtccatgggcatgaagggtatccgaatcactcacattgaccagctggaggccggtctcaaggagatgctcgcatacaagggccctgtgctcgttgaggttgttgtcgacaagaagatccccgttcttcccatggttcccgctggtaaggctttgcatgagttccttgtctacgacgctgacgccgaggctgcttctcgacccgatcgactgaagaatgcccccgcccctcacgtccaccagaccacctttgagaactaagtggaaaggaacacaagcaatccgaaccaaaaataattggggtcccgtgcccacagagtctagtgcagacctaaaatgaccacagtaaattatagctgttattaaacatgagattttgaccaacaagagcgtaggaatgttattagctactacttgtacatacacagcatttgttttaaataatgttgcctccaggggcagtgagatcaggacccagatccgtggccagctctctgacttcagaccgcttgtacttaagcagctcgcaacactgttgtcgaggattgaacttgccatattcgattttgtggtcatgaatccagcacacctcatttaaatgtagctaacggtagcaggcgaactactggtacatacctcccccggaatatgtacaggcataatgcgtatctgtgggacatgtggtcgttgcgccattatgtaagcagcgtgtactcctctgactgtccatatggtttgctccatctcaccctcatcgttttcattgttcacaggcggccacaaaaaaactgtcttctctccttctctcttcgccttagtctactcggaccagttttagtttagcttggcgccactggataaatgagacctcaggccttgtgatgaggaggtcacttatgaagcatgttaggaggtgcttgtatggatagagaagcacccaaaataataagaataataataaaacagggggcgttgtcatttcatatcgtgttttcaccatcaatacacctccaaacaatgcccttcatgtggccagccccaatattgtcctgtagttcaactctatgcagctcgtatcttattgagcaagtaaaactctgtcagccgatattgcccgacccgcgacaagggtcaacaaggtggtgtaaggccttcgcagaagtcaaaactgtgccaaacaaacatctagagtctctttggtgtttctcgcatatatttwatcggctgtcttacgtatttgcgcctcggtaccggactaatttcggatcatccccaatacgctttttcttcgcagctgtcaacagtgtccatgatctatccacctaaatgggtcatatgaggcgtataatttcgtggtgctgataataattcccatatatttgacacaaaacttccccccctagacatacatctcacaatctcacttcttgtgcttctgtcacacatctcctccagctgacttcaactcacacctctgccccagttggtctacagcggtataaggtttctccgcatagaggtgcaccactcctcccgatacttgtttgtgtgacttgtgggtcacgacatatatatctacacacattgcgccaccctttggttcttccagcacaacaaaaacacgacacgctaaccatggccaatttactgaccgtacaccaaaatttgcctgcattaccggtcgatgcaacgagtgatgaggttcgcaagaacctgatggacatgttcagggatcgccaggcgttttctgagcatacctggaaaatgcttctgtccgtttgccggtcgtgggcggcatggtgcaagttgaataaccggaaatggtttcccgcagaacctgaagatgttcgcgattatcttctatatcttcaggcgcgcggtctggcagtaaaaactatccagcaacatttgggccagctaaacatgcttcatcgtcggtccgggctgccacgaccaagtgacagcaatgctgtttcactggttatgcggcggatccgaaaagaaaacgttgatgccggtgaacgtgcaaaacaggctctagcgttcgaacgcactgatttcgaccaggttcgttcactcatggaaaatagcgatcgctgccaggatatacgtaatctggcatttctggggattgcttataacaccctgttacgtatagccgaaattgccaggatcagggttaaagatatctcacgtactgacggtgggagaatgttaatccatattggcagaacgaaaacgctggttagcaccgcaggtgtagagaaggcacttagcctgggggtaactaaactggtcgagcgatggatttccgtctctggtgtagctgatgatccgaataactacctgttttgccgggtcagaaaaaatggtgttgccgcgccatctgccaccagccagctatcaactcgcgccctggaagggatttttgaagcaactcatcgattgatttacggcgctaaggatgactctggtcagagatacctggcctggtctggacacagtgcccgtgtcggagccgcgcgagatatggcccgcgctggagtttcaataccggagatcatgcaagctggtggctggaccaatgtaaatattgtcatgaactatatccgtaacctggatagtgaaacaggggcaatggtgcgcctgctggaagatggcgattaagc

SEQ ID NO: 108 - DNA, 15743 bp, Artificial Sequence
  Plasmid pZP2-2988
ggccgcatgtacatacaagattatttatagaaatgaatcgcgatcgaacaaagagtacgagtgtacgagtaggggatgatgataaaagtggaagaagttccgcatctttggatttatcaacgtgtaggacgatacttcctgtaaaaatgcaatgtctttaccataggttctgctgtagatgttattaactaccattaacatgtctacttgtacagttgcagaccagttggagtatagaatggtacacttaccaaaaagtgttgatggttgtaactacgatatataaaactgttgacgggatctgtatattcggtaagatatattttgtggggttttagtggtgtttaaacagtgtacgcagtactatagaggaacaattgccccggagaagacggccaggccgcctagatgacaaattcaacaactcacagctgactttctgccattgccactaggggggggcctttttatatggccaagccaagctctccacgtcggttgggctgcacccaacaataaatgggtagggttgcaccaacaaagggatgggatggggggtagaagatacgaggataacggggctcaatggcacaaataagaacgaatactgccattaagactcgtgatccagcgactgacaccattgcatcatctaagggcctcaaaactacctcggaactgctgcgctgatctggacaccacagaggttccgagcactttaggttgcaccaaatgtcccaccaggtgcaggcagaaaacgctggaacagcgtgtacagtttgtcttaacaaaaagtgagggcgctgaggtcgagcagggtggtgtgacttgttatagcctttagagctgcgaaagcgcgtatggatttggctcatcaggccagattgagggtctgtggacacatgtcatgttagtgtacttcaatcgccccctggatatagccccgacaataggccgtggcctcatttttttgccttccgcacatttccattgctcggtacccacaccttgcttctcctgcacttgccaaccttaatactggtttacattgaccaacatcttacaagcggggggcttgtctagggtatatataaacagtggctctcccaatcggttgccagtctcttttttcctttctttccccacagattcgaaatctaaactacacatcacaccatggaggtcgtgaacgaaatcgtctccattggccaggaggttcttcccaaggtcgactatgctcagctctggtctgatgcctcgcactgcgaggtgctgtacctctccatcgccttcgtcatcctgaagttcacccttggtcctctcggacccaagggtcagtctcgaatgaagtttgtgttcaccaactacaacctgctcatgtccatctactcgctgggctccttcctctctatggcctacgccatgtacaccattggtgtcatgtccgacaactgcgagaaggctttcgacaacaatgtcttccgaatcaccactcagctgttctacctcagcaagttcctcgagtacattgactccttctatctgcccctcatgggcaagcctctgacctggttgcagttctttcaccatctcggagctcctatggacatgtggctgttctacaactaccgaaacgaagccgtttggatctttgtgctgctcaacggcttcattcactggatcatgtacggctactattggacccgactgatcaagctcaagttccctatgcccaagtccctgattacttctatgcagatcattcagttcaacgttggcttctacatcgtctggaagtaccggaacattccctgctaccgacaagatggaatgagaatgtttggctggtttttcaactacttctacgttggtactgtcctgtgtctgttcctcaacttctacgtgcagacctacatcgtccgaaagcacaagggagccaaaaagattcagtgagcggccgcaagtgtggatggggaagtgagtgcccggttctgtgtgcacaattggcaatccaagatggatggattcaacacagggatatagcgagctacgtggtggtgcgaggatatagcaacggatatttatgtttgacacttgagaatgtacgatacaagcactgtccaagtacaatactaaacatactgtacatactcatactcgtacccgggcaacggtttcacttgagtgcagtggctagtgctcttactcgtacagtgtgcaatactgcgtatcatagtctttgatgtatatcgtattcattcatgttagttgcgtacgggcgtcgttgcttgtgtgatttttgaggacccatccctttggtatataagtatactctggggttaaggttgcccgtgtagtctaggttatagttttcatgtgaaataccgagagccgagggagaataaacgggggtatttggacttgtttttttcgcggaaaagcgtcgaatcaaccctgcgggccttgcaccatgtccacgacgtgtttctcgccccaattcgccccttgcacgtcaaaattaggcctccatctagacccctccataacatgtgactgtggggaaaagtataagggaaaccatgcaaccatagacgacgtgaaagacggggaggaaccaatggaggccaaagaaatggggtagcaacagtccaggagacagacaaggagacaaggagagggcgcccgaaagatcggaaaaacaaacatgtccaattggggcagtgacggaaacgacacggacacttcagtacaatggaccgaccatctccaagccagggttattccggtatcaccttggccgtaacctcccgctggtacctgatattgtacacgttcacattcaatatactttcagctacaataagagaggctgtttgtcgggcatgtgtgtccgtcgtatggggtgatgtccgagggcgaaattcgctacaagcttaactctggcgcttgtccagtatgaatagacaagtcaagaccagtggtgccatgattgacagggaggtacaagacttcgatactcgagcattactcggacttgtggcgattgaacagacgggcgatcgcttctcccccgtattgccggcgcgccagctgcattaatgaatcggccaacgcgcggggagaggcggtttgcgtattgggcgctcttccgcttcctcgctcactgactcgctgcgctcggtcgttcggctgcggcgagcggtatcagctcactcaaaggcggtaatacggttatccacagaatcaggggataacgcaggaaagaacatgtgagcaaaaggccagcaaaaggccaggaaccgtaaaaaggccgcgttgctggcgtttttccataggctccgcccccctgacgagcatcacaaaaatcgacgctcaagtcagaggtggcgaaacccgacaggactataaagataccaggcgtttccccctggaagctccctcgtgcgctctcctgttccgaccctgccgcttaccggatacctgtccgcctttctcccttcgggaagcgtggcgctttctcatagctcacgctgtaggtatctcagttcggtgtaggtcgttcgctccaagctgggctgtgtgcacgaaccccccgttcagcccgaccgctgcgccttatccggtaactatcgtcttgagtccaacccggtaagacacgacttatcgccactggcagcagccactggtaacaggattagcagagcgaggtatgtaggcggtgctacagagttcttgaagtggtggcctaactacggctacactagaagaacagtatttggtatctgcgctctgctgaagccagttaccttcggaaaaagagttggtagctcttgatccggcaaacaaaccaccgctggtagcggtggtttttttgtttgcaagcagcagattacgcgcagaaaaaaaggatctcaagaagatcctttgatcttttctacggggtctgacgctcagtggaacgaaaactcacgttaagggattttggtcatgagattatcaaaaaggatcttcacctagatccttttaaattaaaaatgaagttttaaatcaatctaaagtatatatgagtaaacttggtctgacagttaccaatgcttaatcagtgaggcacctatctcagcgatctgtctatttcgttcatccatagttgcctgactccccgtcgtgtagataactacgatacgggagggcttaccatctggccccagtgctgcaatgataccgcgagacccacgctcaccggctccagatttatcagcaataaaccagccagccggaagggccgagcgcagaagtggtcctgcaactttatccgcctccatccagtctattaattgttgccgggaagctagagtaagtagttcgccagttaatagtttgcgcaacgttgttgccattgctacaggcatcgtggtgtcacgctcgtcgtttggtatggcttcattcagctccggttcccaacgatcaaggcgagttacatgatcccccatgttgtgcaaaaaagcggttagctccttcggtcctccgatcgttgtcagaagtaagttggccgcagtgttatcactcatggttatggcagcactgcataattctcttactgtcatgccatccgtaagatgcttttctgtgactggtgagtactcaaccaagtcattctgagaatagtgtatgcggcgaccgagttgctcttgcccggcgtcaatacgggataataccgcgccacatagcagaactttaaaagtgctcatcattggaaaacgttcttcggggcgaaaactctcaaggatcttaccgctgttgagatccagttcgatgtaacccactcgtgcacccaactgatcttcagcatcttttactttcaccagcgtttctgggtgagcaaaaacaggaaggcaaaatgccgcaaaaaagggaataagggcgacacggaaatgttgaatactcatactcttcctttttcaatattattgaagcatttatcagggttattgtctcatgagcggatacatatttgaatgtatttagaaaaataaacaaataggggttccgcgcacatttccccgaaaagtgccacctgatgcggtgtgaaataccgcacagatgcgtaaggagaaaataccgcatcaggaaattgtaagcgttaatattttgttaaaattcgcgttaaatttttgttaaatcagctcattttttaaccaataggccgaaatcggcaaaatcccttataaatcaaaagaatagaccgagatagggttgagtgttgttccagtttggaacaagagtccactattaaagaacgtggactccaacgtcaaagggcgaaaaaccgtctatcagggcgatggcccactacgtgaaccatcaccctaatcaagttttttggggtcgaggtgccgtaaagcactaaatcggaaccctaaagggagcccccgatttagagcttgacggggaaagccggcgaacgtggcgagaaaggaagggaagaaagcgaaaggagcgggcgctagggcgctggcaagtgtagcggtcacgctgcgcgtaaccaccacacccgccgcgcttaatgcgccgctacagggcgcgtccattcgccattcaggctgcgcaactgttgggaagggcgatcggtgcgggcctcttcgctattacgccagctggcgaaagggggatgtgctgcaaggcgattaagttgggtaacgccagggttttcccagtcacgacgttgtaaaacgacggccagtgaattgtaatacgactcactatagggcgaattgggcccgacgtcgcatgcgctgatgacactttggtctgaaagagatgcattttgaatcccaaacttgcagtgcccaagtgacatacatctccgcgttttggaaaatgttcagaaacagttgattgtgttggaatggggaatggggaatggaaaaatgactcaagtatcaattccaaaaacttctctggctggcagtacctactgtccatactactgcattttctccagtcaggccactctatactcgacgacacagtagtaaaacccagataatttcgacataaacaagaaaacagacccaataatatttatatatagtcagccgtttgtccagttcagactgtaatagccgaaaaaaaatccaaagtttctattctaggaaaatatattccaatatttttaattcttaatctcatttattttattctagcgaaatacatttcagctacttgagacatgtgatacccacaaatcggattcggactcggttgttcagaagagcatatggcattcgtgctcgcttgttcacgtattcttcctgttccatctcttggccgacaatcacacaaaaatggggttttttttttaattctaatgattcattacagcaaaattgagatatagcagaccacgtattccataatcaccaaggaagttcttgggcgtcttaattaactcacctgcaggattgagactatgaatggattcccgtgcccgtattactctactaatttgatcttggaacgcgaaaatacgtttctaggactccaaagaatctcaactcttgtccttactaaatatactacccatagttgatggtttacttgaacagagaggacatgttcacttgacccaaagtttctcgcatctcttggatatttgaacaacggcgtccactgaccgtcagttatccagtcacaaaacccccacattcatacattcccatgtacgtttacaaagttctcaattccatcgtgcaaatcaaaatcacatctattcattcatcatatataaacccatcatgtctactaacactcacaactccatagaaaacatcgactcagaacacacgctccatgcggccgcttactgagccttggcaccgggctgcttctcggccattcgagcgaactgggacaggtatcggagcaggatgacgagaccttcatggggcagagggtttcggtaggggaggttgtgcttctggcacagctgttccacctggtaggaaacggcagtgaggttgtgtcgaggcagggtgggccagagatggtgctcgatctggtagttcaggcctccaaagaaccagtcagtaatgatgcctcgtcgaatgttcatggtctcatggatctgacccacagagaagccatgtccgtcccagacggaatcaccgatcttctccagagggtagtggttcatgaagaccacgatggcaattccgaagccaccgacgagctcggaaacaaagaacaccagcatcgaggtcaggatggagggcataaagaagaggtggaacagggtcttgagagtccagtgcagagcgagtccaatggcctctttcttgtactgagatcggtagaactggttgtctcggtccttgagggatcgaacggtcagcacagactggaaacaccagatgaatcgcaggagaatacagatgaccaggaaatagtactgttggaactgaatgagctttcgggagatgggagaagctcgagtgacatcgtcctcggaccaggcgagcagaggcaggttatcaatgtcgggatcgtgaccctgaacgttggtagcagaatgatgggcgttgtgtctgtccttccaccaggtcacggagaagccctggagtccgttgccaaagaccagacccaggacgttattccagtttcggttcttgaaggtctggtggtggcagatgtcatgagacagccatcccatttgctggtagtgcataccgagcacgagagcaccaatgaagtacaggtggtactggaccagcatgaagaaggcaagcacgccaagacccagggtggtcaagatcttgtacgagtaccagaggggagaggcgtcaaacatgccagtggcgatcagctcttctcggagctttcggaaatcctcctgagcttcgttgacggcagcctggggaggcagctcggaagcctggttgatcttgggcattcgcttgagcttgtcgaaggcttcctgagagtgcataaccatgaaggcgtcagtagcatctcgtccctggtagttctcaatgatttcagctccaccagggtggaagttcacccaagcggagacgtcgtacacctttccgtcgatgacgaggggcagagcctgtcgagaagccttcaccatggttgtgaattagggtggtgagaatggttggttgtagggaagaatcaaaggccggtctcgggatccgtgggtatatatatatatatatatatatacgatccttcgttacctccctgttctcaaaactgtggtttttcgtttttcgttttttgctttttttgatttttttagggccaactaagcttccagatttcgctaatcacctttgtactaattacaagaaaggaagaagctgattagagttgggctttttatgcaactgtgctactccttatctctgatatgaaagtgtagacccaatcacatcatgtcatttagagttggtaatactgggaggatagataaggcacgaaaacgagccatagcagacatgctgggtgtagccaagcagaagaaagtagatgggagccaattgacgagcgagggagctacgccaatccgacatacgacacgctgagatcgtcttggccggggggtacctacagatgtccaagggtaagtgcttgactgtaattgtatgtctgaggacaaatatgtagtcagccgtataaagtcataccaggcaccagtgccatcatcgaaccactaactctctatgatacatgcctccggtattattgtaccatgcgtcgctttgttacatacgtatcttgcctttttctctcagaaactccagactttggctattggtcgagataagcccggaccatagtgagtctttcacactctacatttctcccttgctccaactatttaaattccttcacttcaagttcattcttcatctgcttctgttttactttgacaggcaaatgaagacatggtacgacttgatggaggccaagaacgccatttcaccccgagacaccgaagtgcctgaaatcctggctgcccccattgataacatcggaaactacggtattccggaaagtgtatatagaacctttccccagcttgtgtctgtggatatggatggtgtaatcccctttgagtactcgtcttggcttctctccgagcagtatgaggctctctaatctagcgcatttaatatctcaatgtatttatatatttatcttctcatgcggccgcttactgagccttggcaccgggctgcttctcggccattcgagcgaactgggacaggtatcggagcaggatgacgagaccttcatggggcagagggtttcggtaggggaggttgtgcttctggcacagctgttccacctggtaggaaacggcagtgaggttgtgtcgaggcagggtgggccagagatggtgctcgatctggtagttcaggcctccaaagaaccagtcagtaatgatgcctcgtcgaatgttcatggtctcatggatctgacccacagagaagccatgtccgtcccagacggaatcaccgatcttctccagagggtagtggttcatgaagaccacgatggcaattccgaagccaccgacgagctcggaaacaaagaacaccagcatcgaggtcaggatggagggcataaagaagaggtggaacagggtcttgagagtccagtgcagagcgagtccaatggcctctttcttgtactgagatcggtagaactggttgtctcggtccttgagggatcgaacggtcagcacagactggaaacaccagatgaatcgcaggagaatacagatgaccaggaaatagtactgttggaactgaatgagctttcgggagatgggagaagctcgagtgacatcgtcctcggaccaggcgagcagaggcaggttatcaatgtcgggatcgtgaccctgaacgttggtagcagaatgatgggcgttgtgtctgtccttccaccaggtcacggagaagccctggagtccgttgccaaagaccagacccaggacgttattccagtttcggttcttgaaggtctggtggtggcagatgtcatgagacagccatcccatttgctggtagtgcataccgagcacgagagcaccaatgaagtacaggtggtactggaccagcatgaagaaggcaagcacgccaagacccagggtggtcaagatcttgtacgagtaccagaggggagaggcgtcaaacatgccagtggcgatcagctcttctcggagctttcggaaatcctcctgagcttcgttgacggcagcctggggaggcagctcggaagcctggttgatcttgggcattcgcttgagcttgtcgaaggcttcctgagagtgcataaccatgaaggcgtcagtagcatctcgtccctggtagttctcaatgatttcagctccaccagggtggaagttcacccaagcggagacgtcgtacacctttccgtcgatgacgaggggcagagcctgtcgagaagccttcaccatgggcaggacctgtgttagtacattgtcggggagtcatcaattggttcgacaggttgtcgactgttagtatgagctcaattgggctctggtgggtcgatgacacttgtcatctgtttctgttgggtcatgtttccatcaccttctatggtactcacaattcgtccgattcgcccgaatccgttaataccgactttgatggccatgttgatgtgtgtttaattcaagaatgaatatagagaagagaagaagaaaaaagattcaattgagccggcgatgcagacccttatataaatgttgccttggacagacggagcaagcccgcccaaacctacgttcggtataatatgttaagctttttaacacaaaggtttggcttggggtaacctgatgtggtgcaaaagaccgggcgttggcgagccattgcgcgggcgaatggggccgtgactcgtctcaaattcgagggcgtgcctcaattcgtgcccccgtggctttttcccgccgtttccgccccgtttgcaccactgcagccgcttctttggttcggacaccttgctgcgagctaggtgccttgtgctacttaaaaagtggcctcccaacaccaacatgacatgagtgcgtgggccaagacacgttggcggggtcgcagtcggctcaatggcccggaaaaaacgctgctggagctggttcggacgcagtccgccgcggcgtatggatatccgcaaggttccatagcgccattgccctccgtcggcgtctatcccgcaacctctaaatagagcgggaatataacccaagcttcttttttttcctttaacacgcacacccccaactatcatgttgctgctgctgtttgactctactctgtggaggggtgctcccacccaacccaacctacaggtggatccggcgctgtgattggctgataagtctcctatccggactaattctgaccaatgggacatgcgcgcaggacccaaatgccgcaattacgtaaccccaacgaaatgcctacccctctttggagcccagcggccccaaatccccccaagcagcccggttctaccggcttccatctccaagcacaagcagcccggaattcctttacctgcaggataacttcgtataatgtatgctatacgaagttatgatctctctcttgagcttttccataacaagttcttctgcctccaggaagtccatgggtggtttgatcatggttttggtgtagtggtagtgcagtggtggtattgtgactggggatgtagttgagaataagtcatacacaagtcagctttcttcgagcctcatataagtataagtagttcaacgtattagcactgtacccagcatctccgtatcgagaaacacaacaacatgccccattggacagatcatgcggatacacaggttgtgcagtatcatacatactcgatcagacaggtcgtctgaccatcatacaagctgaacaagcgctccatacttgcacgctctctatatacacagttaaattacatatccatagtctaacctctaacagttaatcttctggtaagcctcccagccagccttctggtatcgcttggcctcctcaataggatctcggttctggccgtacagacctcggccgacaattatgatatccgttccggtagacatgacatcctcaacagttcggtactgctgtccgagagcgtctcccttgtcgtcaagacccaccccgggggtcagaataagccagtcctcagagtcgcccttaggtcggttctgggcaatgaagccaaccacaaactcggggtcggatcgggcaagctcaatggtctgcttggagtactcgccagtggccagagagcccttgcaagacagctcggccagcatgagcagacctctggccagcttctcgttgggagaggggactaggaactccttgtactgggagttctcgtagtcagagacgtcctccttcttctgttcagagacagtttcctcggcaccagctcgcaggccagcaatgattccggttccgggtacaccgtgggcgttggtgatatcggaccactcggcgattcggtgacaccggtactggtgcttgacagtgttgccaatatctgcgaactttctgtcctcgaacaggaagaaaccgtgcttaagagcaagttccttgagggggagcacagtgccggcgtaggtgaagtcgtcaatgatgtcgatatgggttttgatcatgcacacataaggtccgaccttatcggcaagctcaatgagctccttggtggtggtaacatccagagaagcacacaggttggttttcttggctgccacgagcttgagcactcgagcggcaaaggcggacttgtggacgttagctcgagcttcgtaggagggcattttggtggtgaagaggagactgaaataaatttagtctgcagaactttttatcggaaccttatctggggcagtgaagtatatgttatggtaatagttacgagttagttgaacttatagatagactggactatacggctatcggtccaaattagaaagaacgtcaatggctctctgggcgtcgcctttgccgacaaaaatgtgatcatgatgaaagccagcaatgacgttgcagctgatattgttgtcggccaaccgcgccgaaaacgcagctgtcagacccacagcctccaacgaagaatgtatcgtcaaagtgatccaagcacactcatagttggagtcgtactccaaaggcggcaatgacgagtcagacagatactcgtcgacgcgataacttcgtataatgtatgctatacgaagttatcgtacgatagttagtagacaacaatcgataacgtctcgtaccaaccacagattacgacccattcgcagtcacagttcactagggtttgggttgcatccgttgagagcggtttgtttttaaccttctccatgtgctcactcaggttttgggttcagatcaaatcaaggcgtgaaccactttgtttgaggacaaatgtgacacaaccaaccagtgtcaggggcaagtccgtgacaaaggggaagatacaatgcaattactgacagttacagactgcctcgatgccctaaccttgccccaaaataagacaactgtcctcgtttaagcgcaaccctattcagcgtcacgtcataatagcgtttggatagcactagtctatgaggagcgttttatgttgcggtgagggcgattggtgctcatatgggttcaattgaggtggcggaacgagcttagtcttcaattgaggtgcgagcgacacaattgggtgtcacgtggcctaattgacctcgggtcgtggagtccccagttatacagcaaccacgaggtgcatgggtaggagacgtcaccagacaatagggttttttttggactggagagggttgggcaaaagcgctcaacgggctgtttggggagctgtgggggaggaattggcgatatttgtgaggttaacggctccgatttgcgtgttttgtcgctcctgcatctccccatacccatatcttccctccccacctctttccacgataattttacggatcagcaataaggttccttctcctagtttccacgtccatatatatctatgctgcgtcgtccttttcgtgacatcaccaaaacacatacaacaatggctgttactgacgtccttaagcgaaagtccggtgtcatcgtcggcgacgatgtccgagccgtgagtatccacgacaagatcagtgtcgagacgacgcgttttgtgtaatgacacaatccgaaagtcgctagcaacacacactctctacacaaactaacccagctctccatggcctccacctcggctctgcccaagcagaaccctgccctccgacgaaccgtcacttccaccactgtgaccgactcggagtctgctgccgtctctccctccgattctcccagacactcggcctcctctacatcgctgtcttccatgtccgaggtggacattgccaagcccaagtccgagtacggtgtcatgctggatacctacggcaaccagttcgaagttcccgacttcaccatcaaggacatctacaacgctattcccaagcactgcttcaagcgatctgctctcaagggatacggctacattcttcgagacattgtcctcctgactaccactttcagcatctggtacaactttgtgacacccgagtacattccctccactcctgctcgagccggtctgtgggctgtgtacaccgttcttcagggactcttcggtactggactgtgggtcattgcccacgagtgtggacatggtgctttctccgattcccgaatcatcaacgacattactggctgggtgcttcactcttccctgcttgttccctacttcagctggcaaatctcccaccggaagcatcacaaggccactggaaacatggagcgagacatggtcttcgttcctcgaacccgagagcagcaagctactcgactcggcaagatgacccacgaactcgcccatcttaccgaggaaactcctgctttcaccctgctcatgcttgtgcttcagcaactggtcggttggcccaactatctcattaccaacgttactggacacaactaccatgagcggcagcgagagggtcgaggcaagggaaagcacaacggtcttggcggtggagttaaccatttcgatccccgatctcctctgtacgagaacagcgacgccaagctcatcgtgctctccgacattggcattggtcttatggccaccgctctgtactttctcgttcagaagttcggattctacaacatggccatctggtacttcgttccctacttgtgggttaaccactggctcgtcgccattacctttctgcagcacacagatcctactcttccccactacaccaacgacgagtggaactttgtgcgaggtgccgctgcaaccatcgaccgagagatgggcttcattggacgtcatctgctccacggcattatcgagactcacgtcctgcatcactacgtctcttccattcccttctacaatgcggacgaagctaccgaggccatcaaacctatcatgggcaagcactatcgagctgatgtccaggacggtcctcgaggattcattcgagccatgtaccgatctgcacgaatgtgccagtgggttgaaccctccgctggtgccgagggagctggcaagggtgtcctgttctttcgaaaccgaaacaatgtgggcactcctcccgctgtcatcaagcccgttgcctaagc

SEQ ID NO: 109 - DNA, 1434 bp, Fusarium moniliforme
  CDS (1)..(1434): synthetic delta-12 desaturase (codon-optimized for Yarrowia lipolytica)
  ref <302>: TITLE: DELTA-12 DESATURASES SUITABLE FOR ALTERING LEVELS OF POLYUNSATURATED FATTY ACIDS IN OLEAGINOUS YEAST
  ref <310>: PATENT DOCUMENT NUMBER: WO 2005/047485
  ref <311>: PATENT FILING DATE: 2004-11-12
  ref <312>: PUBLICATION DATE: 2005-05-26
  ref <313>: RELEVANT RESIDUES IN SEQ ID NO: (1)..(1434)
  ref <302>: TITLE: DELTA-12 DESATURASES SUITABLE FOR ALTERING LEVELS OF POLYUNSATURATED FATTY ACIDS IN OLEAGINOUS YEAST
  ref <310>: PATENT DOCUMENT NUMBER: US 2005-0216975-A1
  ref <311>: PATENT FILING DATE: 2004-11-10
  ref <312>: PUBLICATION DATE: 2005-09-29
  ref <313>: RELEVANT RESIDUES IN SEQ ID NO: (1)..(1434)
atggcctccacctcggctctgcccaagcagaaccctgccctccgacgaaccgtcacttccaccactgtgaccgactcggagtctgctgccgtctctccctccgattctcccagacactcggcctcctctacatcgctgtcttccatgtccgaggtggacattgccaagcccaagtccgagtacggtgtcatgctggatacctacggcaaccagttcgaagttcccgacttcaccatcaaggacatctacaacgctattcccaagcactgcttcaagcgatctgctctcaagggatacggctacattcttcgagacattgtcctcctgactaccactttcagcatctggtacaactttgtgacacccgagtacattccctccactcctgctcgagccggtctgtgggctgtgtacaccgttcttcagggactcttcggtactggactgtgggtcattgcccacgagtgtggacatggtgctttctccgattcccgaatcatcaacgacattactggctgggtgcttcactcttccctgcttgttccctacttcagctggcaaatctcccaccggaagcatcacaaggccactggaaacatggagcgagacatggtcttcgttcctcgaacccgagagcagcaagctactcgactcggcaagatgacccacgaactcgcccatcttaccgaggaaactcctgctttcaccctgctcatgcttgtgcttcagcaactggtcggttggcccaactatctcattaccaacgttactggacacaactaccatgagcggcagcgagagggtcgaggcaagggaaagcacaacggtcttggcggtggagttaaccatttcgatccccgatctcctctgtacgagaacagcgacgccaagctcatcgtgctctccgacattggcattggtcttatggccaccgctctgtactttctcgttcagaagttcggattctacaacatggccatctggtacttcgttccctacttgtgggttaaccactggctcgtcgccattacctttctgcagcacacagatcctactcttccccactacaccaacgacgagtggaactttgtgcgaggtgccgctgcaaccatcgaccgagagatgggcttcattggacgtcatctgctccacggcattatcgagactcacgtcctgcatcactacgtctcttccattcccttctacaatgcggacgaagctaccgaggccatcaaacctatcatgggcaagcactatcgagctgatgtccaggacggtcctcgaggattcattcgagccatgtaccgatctgcacgaatgtgccagtgggttgaaccctccgctggtgccgagggagctggcaagggtgtcctgttctttcgaaaccgaaacaatgtgggcactcctcccgctgtcatcaagcccgttgcctaa

SEQ ID NO: 110 - protein, 477 aa, Fusarium moniliforme; identical to SEQ ID NO: 45

SEQ ID NO: 111 - DNA, 6303 bp, Artificial Sequence
  Plasmid pZKUE3S
ggccgcaagtgtggatggggaagtgagtgcccggttctgtgtgcacaattggcaatccaagatggatggattcaacacagggatatagcgagctacgtggtggtgcgaggatatagcaacggatatttatgtttgacacttgagaatgtacgatacaagcactgtccaagtacaatactaaacatactgtacatactcatactcgtacccgggcaacggtttcacttgagtgcagtggctagtgctcttactcgtacagtgtgcaatactgcgtatcatagtctttgatgtatatcgtattcattcatgttagttgcgtacgaggaaactgtctctgaacagaagaaggaggacgtctctgactacgagaactcccagtacaaggagttcctagtcccctctcccaacgagaagctggccagaggtctgctcatgctggccgagctgtcttgcaagggctctctggccactggcgagtactccaagcagaccattgagcttgcccgatccgaccccgagtttgtggttggcttcattgcccagaaccgacctaagggcgactctgaggactggcttattctgacccccggggtgggtcttgacgacaagggagacgctctcggacagcagtaccgaactgttgaggatgtcatgtctaccggaacggatatcataattgtcggccgaggtctgtacggccagaaccgagatcctattgaggaggccaagcgataccagaaggctggctgggaggcttaccagaagattaactgttagaggttagactatggatatgtaatttaactgtgtatatagagagcgtgcaagtatggagcgcttgttcagcttgtatgatggtcagacgacctgtctgatcgagtatgtatgatactgcacaacctgtgtatccgcatgatctgtccaatggggcatgttgttgtgtttctcgatacggagatgctgggtacagtgctaatacgttgaactacttatacttatatgaggctcgaagaaagctgacttgtgtatgacttaattaatcgagcttggcgtaatcatggtcatagctgtttcctgtgtgaaattgttatccgctcacaattccacacaacatacgagccggaagcataaagtgtaaagcctggggtgcctaatgagtgagctaactcacattaattgcgttgcgctcactgcccgctttccagtcgggaaacctgtcgtgccagctgcattaatgaatcggccaacgcgcggggagaggcggtttgcgtattgggcgctcttccgcttcctcgctcactgactcgctgcgctcggtcgttcggctgcggcgagcggtatcagctcactcaaaggcggtaatacggttatccacagaatcaggggataacgcaggaaagaacatgtgagcaaaaggccagcaaaaggccaggaaccgtaaaaaggccgcgttgctggcgtttttccataggctccgcccccctgacgagcatcacaaaaatcgacgctcaagtcagaggtggcgaaacccgacaggactataaagataccaggcgtttccccctggaagctccctcgtgcgctctcctgttccgaccctgccgcttaccggatacctgtccgcctttctcccttcgggaagcgtggcgctttctcatagctcacgctgtaggtatctcagttcggtgtaggtcgttcgctccaagctgggctgtgtgcacgaaccccccgttcagcccgaccgctgcgccttatccggtaactatcgtcttgagtccaacccggtaagacacgacttatcgccactggcagcagccactggtaacaggattagcagagcgaggtatgtaggcggtgctacagagttcttgaagtggtggcctaactacggctacactagaaggacagtatttggtatctgcgctctgctgaagccagttaccttcggaaaaagagttggtagctcttgatccggcaaacaaaccaccgctggtagcggtggtttttttgtttgcaagcagcagattacgcgcagaaaaaaaggatctcaagaagatcctttgatcttttctacggggtctgacgctcagtggaacgaaaactcacgttaagggattttggtcatgagattatcaaaaaggatcttcacctagatccttttaaattaaaaatgaagttttaaatcaatctaaagtatatatgagtaaacttggtctgacagttaccaatgcttaatcagtgaggcacctatctcagcgatctgtctatttcgttcatccatagttgcctgactccccgtcgtgtagataactacgatacgggagggcttaccatctggccccagtgctgcaatgataccgcgagacccacgctcaccggctccagatttatcagcaataaaccagccagccggaagggccgagcgcagaagtggtcctgcaactttatccgcctccatccagtctattaattgttgccgggaagctagagtaagtagttcgccagttaatagtttgcgcaacgttgttgccattgctacaggcatcgtggtgtcacgctcgtcgtttggtatggcttcattcagctccggttcccaacgatcaaggcgagttacatgatcccccatgttgtgcaaaaaagcggttagctccttcggtcctccgatcgttgtcagaagtaagttggccgcagtgttatcactcatggttatggcagcactgcataattctcttactgtcatgccatccgtaagatgcttttctgtgactggtgagtactcaaccaagtcattctgagaatagtgtatgcggcgaccgagttgctcttgcccggcgtcaatacgggataataccgcgccacatagcagaactttaaaagtgctcatcattggaaaacgttcttcggggcgaaaactctcaaggatcttaccgctgttgagatccagttcgatgtaacccactcgtgcacccaactgatcttcagcatcttttactttcaccagcgtttctgggtgagcaaaaacaggaaggcaaaatgccgcaaaaaagggaataagggcgacacggaaatgttgaatactcatactcttcctttttcaatattattgaagcatttatcagggttattgtctcatgagcggatacatatttgaatgtatttagaaaaataaacaaataggggttccgcgcacatttccccgaaaagtgccacctgacgcgccctgtagcggcgcattaagcgcggcgggtgtggtggttacgcgcagcgtgaccgctacacttgccagcgccctagcgcccgctcctttcgctttcttcccttcctttctcgccacgttcgccggctttccccgtcaagctctaaatcgggggctccctttagggttccgatttagtgctttacggcacctcgaccccaaaaaacttgattagggtgatggttcacgtagtgggccatcgccctgatagacggtttttcgccctttgacgttggagtccacgttctttaatagtggactcttgttccaaactggaacaacactcaaccctatctcggtctattcttttgatttataagggattttgccgatttcggcctattggttaaaaaatgagctgatttaacaaaaatttaacgcgaattttaacaaaatattaacgcttacaatttccattcgccattcaggctgcgcaactgttgggaagggcgatcggtgcgggcctcttcgctattacgccagctggcgaaagggggatgtgctgcaaggcgattaagttgggtaacgccagggttttcccagtcacgacgttgtaaaacgacggccagtgaattgtaatacgactcactatagggcgaattgggtaccgggccccccctcgaggtcgacgagtatctgtctgactcgtcattgcatgcctttggagtacgactccaactatgagtgtgcttggatcactttgacgatacattcttcgttggaggctgtgggtctgacagctgcgttttcggcgcggttggccgacaacaatatcagctgcaacgtcattgctggctttcatcatgatcacatttttgtcggcaaaggcgacgcccagagagccattgacgttctttctaatttggaccgatagccgtatagtccagtctatctataagttcaactaactcgtaactattaccataacatatacttcactgccccagataaggttccgataaaaagttctgcagactaaatttatttcagtctcctcttcaccaccaaaatgccctcctacgaagctcgagtgctcaagctcgtggcagccaagaaaaccaacctgtgtgcttctctggatgttaccaccaccaaggagctcattgagcttgccgataaggtcggaccttatgtgtgcatgatcaaaacccatatcgacatcattgacgacttcacctacgccggcactgtgctccccctcaaggaacttgctcttaagcacggtttcttcctgttcgaggacagaaagttcgcagatattggcaacactgtcaagcaccagtaccggtgtcaccgaatcgccgagtggtccgatatcaccaacgcccacggtgtttaaacccggaaccggaatcgataagcttgatatcgaattcatgctgttcatcgtggttaatgctgctgtgtgctgtgtgtgtgtgttgtttggcgctcattgttgcgttatgcagcgtacaccacaatattggaagcttattagcctttctattttttcgtttgcaaggcttaacaacattgctgtggagagggatggggatatggaggccgctggagggagtcggagaggcgttttggagcggcttggcctggcgcccagctcgcgaaacgcacctaggaccctttggcacgccgaaatgtgccacttttcagtctagtaacgccttacctacgtcattccatgcgtgcatgtttgcgccttttttcccttgcccttgatcgccacacagtacagtgcactgtacagtggaggttttgggggggtcttagatgggagctaaaagcggcctagcggtacactagtgggattgtatggagtggcatggagcctaggtggagcctgacaggacgcacgaccggctagcccgtgacagacgatgggtggctcctgttgtccaccgcgtacaaatgtttgggccaaagtcttgtcagccttgcttgcgaacctaattcccaattttgtcacttcgcacccccattgatcgagccctaacccctgcccatcaggcaatccaattaagctcgcattgtctgccttgtttagtttggctcctgcccgtttcggcgtccacttgcacaaacacaaacaagcattatatataaggctcgtctctccctcccaaccacactcacttttttgcccgtcttcccttgctaacacaaaagtcaagaacacaaacaaccaccccaacccccttacacacaagacatatctacaccatggagtctggacccatgcctgctggcattcccttccctgagtactatgacttctttatggactggaagactcccctggccatcgctgccacctacactgctgccgtcggtctcttcaaccccaaggttggcaaggtctcccgagtggttgccaagtcggctaacgcaaagcctgccgagcgaacccagtccggagctgccatgactgccttcgtctttgtgcacaacctcattctgtgtgtctactctggcatcaccttctactacatgtttcctgctatggtcaagaacttccgaacccacacactgcacgaagcctactgcgacacggatcagtccctctggaacaacgcacttggctactggggttacctcttctacctgtccaagttctacgaggtcattgacaccatcatcatcatcctgaagggacgacggtcctcgctgcttcagacctaccaccatgctggagccatgattaccatgtggtctggcatcaactaccaagccactcccatttggatctttgtggtcttcaactccttcattcacaccatcatgtactgttactatgccttcacctctatcggattccatcctcctggcaaaaagtacctgacttcgatgcagattactcagtttctggtcggtatcaccattgccgtgtcctacctcttcgttcctggctgcatccgaacacccggtgctcagatggctgtctggatcaacgtcggctacctgtttcccttgacctatctgttcgtggactttgccaagcgaacctactccaagcgatctgccattgccgctcagaaaaaggctcagtaagc

SEQ ID NO: 112 - DNA, 15877 bp, Artificial Sequence
  Plasmid pZKL1-2SP98C
aaatgatgtcgacgcagtaggatgtcctgcacgggtctttttgtggggtgtggagaaaggggtgcttggatcgatggaagccggtagaaccgggctgcttgtgcttggagatggaagccggtagaaccgggctgcttggggggatttggggccgctgggctccaaagaggggtaggcatttcgttggggttacgtaattgcggcatttgggtcctgcgcgcatgtcccattggtcagaattagtccggataggagacttatcagccaatcacagcgccggatccacctgtaggttgggttgggtgggagcacccctccacagagtagagtcaaacagcagcagcaacatgatagttgggggtgtgcgtgttaaaggaaaaaaaagaagcttgggttatattcccgctctatttagaggttgcgggatagacgccgacggagggcaatggcgctatggaaccttgcggatatccatacgccgcggcggactgcgtccgaaccagctccagcagcgttttttccgggccattgagccgactgcgaccccgccaacgtgtcttggcccacgcactcatgtcatgttggtgttgggaggccactttttaagtagcacaaggcacctagctcgcagcaaggtgtccgaaccaaagaagcggctgcagtggtgcaaacggggcggaaacggcgggaaaaagccacgggggcacgaattgaggcacgccctcgaatttgagacgagtcacggccccattcgcccgcgcaatggctcgccaacgcccggtcttttgcaccacatcaggttaccccaagccaaacctttgtgttaaaaagcttaacatattataccgaacgtaggtttgggcgggcttgctccgtctgtccaaggcaacatttatataagggtctgcatcgccggctcaattgaatcttttttcttcttctcttctctatattcattcttgaattaaacacacatcaaccatgggcgtattcattaaacaggagcagcttccggctctcaagaagtacaagtactccgccgaggatcactcgttcatctccaacaacattctgcgccccttctggcgacagtttgtcaaaatcttccctctgtggatggcccccaacatggtgactctgctgggcttcttctttgtcattgtgaacttcatcaccatgctcattgttgatcccacccacgaccgcgagcctcccagatgggtctacctcacctacgctctgggtctgttcctttaccagacatttgatgcctgtgacggatcccatgcccgacgaactggccagagtggaccccttggagagctgtttgaccactgtgtcgacgccatgaatacctctctgattctcacggtggtggtgtccaccacccatatgggatataacatgaagctactgattgtgcagattgccgctctcggaaacttctacctgtcgacctgggagacctaccataccggaactctgtacctttctggcttctctggtcctgttgaaggtatcttgattctggtggctcttttcgtcctcaccttcttcactggtcccaacgtgtacgctctgaccgtctacgaggctcttcccgagtccatcacttcgctgctgcctgccagcttcctggacgtcaccatcacccagatctacattggattcggagtgctgggcatggtgttcaacatctacggcgcctgcggaaacgtgatcaagtactacaacaacaagggcaagagcgctctccccgccattctcggaatcgccccctttggcatcttctacgtcggcgtctttgcctgggcccatgttgctcctctgcttctctccaagtacgccatcgtctatctgtttgccattggggctgcctttgccatgcaagtcggccagatgattcttgcccatctcgtgcttgctccctttccccactggaacgtgctgctcttcttcccctttgtgggactggcagtgcactacattgcacccgtgtttggctgggacgccgatatcgtgtcggttaacactctcttcacctgttttggcgccaccctctccatttacgccttctttgtgcttgagatcatcgacgagatcaccaactacctcgatatctggtgtctgcgaatcaagtaccctcaggagaagaagaccgaataagcggccgcatggagcgtgtgttctgagtcgatgttttctatggagttgtgagtgttagtagacatgatgggtttatatatgatgaatgaatagatgtgattttgatttgcacgatggaattgagaactttgtaaacgtacatgggaatgtatgaatgtgggggttttgtgactggataactgacggtcagtggacgccgttgttcaaatatccaagagatgcgagaaactttgggtcaagtgaacatgtcctctctgttcaagtaaaccatcaactatgggtagtatatttagtaaggacaagagttgagattctttggagtcctagaaacgtattttcgcgttccaagatcaaattagtagagtaatacgggcacgggaatccattcatagtctcaatcctgcaggtgagttaattaatcgagcttggcgtaatcatggtcatagctgtttcctgtgtgaaattgttatccgctcacaattccacacaacgtacgatagttagtagacaacaatcagaacatctccctccttatataatcacacaggccagaacgcgctaaactaaagcgctttggacactatgttacattggcattgattgaactgaaaccacagtctccctcgcctgaatcgagcaatggatgttgtcggaagtcaacttcactagaagagcggttctatgccttgtcaagatcatatcataaactcactctgtattaccccatctatagaacacttgttatgaatgggcggaaacattccgctatatgcacctttccacactaatgcaaagatgtgcatcttcaacgggtagtaagactggttccgacttccgttgcatggagagcaatgacctcgataatgcgaacatcccccacatatacactcttacacaggccaatataatctgtgcatttactaaatatttaagtctatgcacctgcttgatgaaaagcggcacggatggtatcatctagtttccgccaatccaagaaccaactgtgttggcagtggtgtagcccatggcacacagaccaaagatgaaaatacagacatcggcggttcgagccgtggtgcctcgagcaacacccttgtaatgcaaaagaggagggtaaatgtacaccagaggcacacatgcaaacgatccggtgagagcgacgaaccgatcgagatcgtcggcacctccccatgcaacaaaggcggtgacaaacacaaggaagaaccggaaaatgttcttctgccacttgatggtagagttgtacttgcctgatcgggtgaagagaccattctcgatgattcggatggcgcgccagctgcattaatgaatcggccaacgcgcggggagaggcggtttgcgtattgggcgctcttccgcttcctcgctcactgactcgctgcgctcggtcgttcggctgcggcgagcggtatcagctcactcaaaggcggtaatacggttatccacagaatcaggggataacgcaggaaagaacatgtgagcaaaaggccagcaaaaggccaggaaccgtaaaaaggccgcgttgctggcgtttttccataggctccgcccccctgacgagcatcacaaaaatcgacgctcaagtcagaggtggcgaaacccgacaggactataaagataccaggcgtttccccctggaagctccctcgtgcgctctcctgttccgaccctgccgcttaccggatacctgtccgcctttctcccttcgggaagcgtggcgctttctcatagctcacgctgtaggtatctcagttcggtgtaggtcgttcgctccaagctgggctgtgtgcacgaaccccccgttcagcccgaccgctgcgccttatccggtaactatcgtcttgagtccaacccggtaagacacgacttatcgccactggcagcagccactggtaacaggattagcagagcgaggtatgtaggcggtgctacagagttcttgaagtggtggcctaactacggctacactagaagaacagtatttggtatctgcgctctgctgaagccagttaccttcggaaaaagagttggtagctcttgatccggcaaacaaaccaccgctggtagcggtggtttttttgtttgcaagcagcagattacgcgcagaaaaaaaggatctcaagaagatcctttgatcttttctacggggtctgacgctcagtggaacgaaaactcacgttaagggattttggtcatgagattatcaaaaaggatcttcacctagatccttttaaattaaaaatgaagttttaaatcaatctaaagtatatatgagtaaacttggtctgacagttaccaatgcttaatcagtgaggcacctatctcagcgatctgtctatttcgttcatccatagttgcctgactccccgtcgtgtagataactacgatacgggagggcttaccatctggccccagtgctgcaatgataccgcgagacccacgctcaccggctccagatttatcagcaataaaccagccagccggaagggccgagcgcagaagtggtcctgcaactttatccgcctccatccagtctattaattgttgccgggaagctagagtaagtagttcgccagttaatagtttgcgcaacgttgttgccattgctacaggcatcgtggtgtcacgctcgtcgtttggtatggcttcattcagctccggttcccaacgatcaaggcgagttacatgatcccccatgttgtgcaaaaaagcggttagctccttcggtcctccgatcgttgtcagaagtaagttggccgcagtgttatcactcatggttatggcagcactgcataattctcttactgtcatgccatccgtaagatgcttttctgtgactggtgagtactcaaccaagtcattctgagaatagtgtatgcggcgaccgagttgctcttgcccggcgtcaatacgggataataccgcgccacatagcagaactttaaaagtgctcatcattggaaaacgttcttcggggcgaaaactctcaaggatcttaccgctgttgagatccagttcgatgtaacccactcgtgcacccaactgatcttcagcatcttttactttcaccagcgtttctgggtgagcaaaaacaggaaggcaaaatgccgcaaaaaagggaataagggcgacacggaaatgttgaatactcatactcttcctttttcaatattattgaagcatttatcagggttattgtctcatgagcggatacatatttgaatgtatttagaaaaataaacaaataggggttccgcgcacatttccccgaaaagtgccacctgatgcggtgtgaaataccgcacagatgcgtaaggagaaaataccgcatcaggaaattgtaagcgttaatattttgttaaaattcgcgttaaatttttgttaaatcagctcattttttaaccaataggccgaaatcggcaaaatcccttataaatcaaaagaatagaccgagatagggttgagtgttgttccagtttggaacaagagtccactattaaagaacgtggactccaacgtcaaagggcgaaaaaccgtctatcagggcgatggcccactacgtgaaccatcaccctaatcaagttttttggggtcgaggtgccgtaaagcactaaatcggaaccctaaagggagcccccgatttagagcttgacggggaaagccggcgaacgtggcgagaaaggaagggaagaaagcgaaaggagcgggcgctagggcgctggcaagtgtagcggtcacgctgcgcgtaaccaccacacccgccgcgcttaatgcgccgctacagggcgcgtccattcgccattcaggctgcgcaactgttgggaagggcgatcggtgcgggcctcttcgctattacgccagctggcgaaagggggatgtgctgcaaggcgattaagttgggtaacgccagggttttcccagtcacgacgttgtaaaacgacggccagtgaattgtaatacgactcactatagggcgaattgggcccgacgtcgcatgcttagaagtgaggattacaagaagcctctggatatcaatgatgaacgtactcagcggctggtcaagcatttcgaccgtcgaatcgacgaggtgttcacctttgacaagcgagggttcccaattgatcacgttctcgagttgttcaaatcttctctcaacatctctctgcatgaactatctctgttgacgaacgtgtcacccactgttcctcgaacgcccttctccgagtttggtctgaacatcttcgatctcaaactgacccccgcagtgatcaatagtgccatgccactgccgatgcggtgcgaacatccctggagggattctcggagctctacacaatgcagattctgtcgtcgagtactctctaccttgctcgaatgacttattgtgctactactgcactcatgcttcgatcatgtgccctactgcaccccaaatttggtgatctgattgagacagagtaccctcttcagctgattcagaagatcatcagcaacatgaatgatgtggttgaccaggcaggctgttgtagtcacgtccttcacttcaagttcattcttcatctgcttctgttttactttgacaggcaaatgaagacatggtacgacttgatggaggccaagaacgccatttcaccccgagacaccgaagtgcctgaaatcctggctgcccccattgataacatcggaaactacggtattccggaaagtgtatatagaacctttccccagcttgtgtctgtggatatggatggtgtaatccccttaattaactcacctgcaggattgagactatgaatggattcccgtgcccgtattactctactaatttgatcttggaacgcgaaaatacgtttctaggactccaaagaatctcaactcttgtccttactaaatatactacccatagttgatggtttacttgaacagagaggacatgttcacttgacccaaagtttctcgcatctcttggatatttgaacaacggcgtccactgaccgtcagttatccagtcacaaaacccccacattcatacattcccatgtacgtttacaaagttctcaattccatcgtgcaaatcaaaatcacatctattcattcatcatatataaacccatcatgtctactaacactcacaactccatagaaaacatcgactcagaacacacgctccatgcggccgcttaggcaacgggcttgatgacagcgggaggagtgcccacattgtttcggtttcgaaagaacaggacacccttgccagctccctcggcaccagcggagggttcaacccactggcacattcgtgcagatcggtacatggctcgaatgaatcctcgaggaccgtcctggacatcagctcgatagtgcttgcccatgataggtttgatggcctcggtagcttcgtccgcattgtagaagggaatggaagagacgtagtgatgcaggacgtgagtctcgataatgccgtggagcagatgacgtccaatgaagcccatctctcggtcgatggttgcagcggcacctcgcacaaagttccactcgtcgttggtgtagtggggaagagtaggatctgtgtgctgcagaaaggtaatggcgacgagccagtggttaacccacaagtagggaacgaagtaccagatggccatgttgtagaatccgaacttctgaacgagaaagtacagagcggtggccataagaccaatgccaatgtcggagagcacgatgagcttggcgtcgctgttctcgtacagaggagatcggggatcgaaatggttaactccaccgccaagaccgttgtgctttcccttgcctcgaccctctcgctgccgctcatggtagttgtgtccagtaacgttggtaatgagatagttgggccaaccgaccagttgctgaagcacaagcatgagcagggtgaaagcaggagtttcctcggtaagatgggcgagttcgtgggtcatcttgccgagtcgagtagcttgctgctctcgggttcgaggaacgaagaccatgtctcgctccatgtttccagtggccttgtgatgcttccggtgggagatttgccagctgaagtagggaacaagcagggaagagtgaagcacccagccagtaatgtcgttgatgattcgggaatcggagaaagcaccatgtccacactcgtgggcaatgacccacagtccagtaccgaagagtccctgaagaacggtgtacacagcccacagaccggctcgagcaggagtggagggaatgtactcgggtgtcacaaagttgtaccagatgctgaaagtggtagtcaggaggacaatgtctcgaagaatgtagccgtatcccttgagagcagatcgcttgaagcagtgcttgggaatagcgttgtagatgtccttgatggtgaagtcgggaacttcgaactggttgccgtaggtatccagcatgacaccgtactcggacttgggcttggcaatgtccacctcggacatggaagacagcgatgtagaggaggccgagtgtctgggagaatcggagggagagacggcagcagactccgagtcggtcacagtggtggaagtgacggttcgtcggagggcagggttctgcttgggcagagccgaggtggaggccatggccattgctgtagatatgtcttgtgtgtaagggggttggggtggttgtttgtgttcttgacttttgtgttagcaagggaagacgggcaaaaaagtgagtgtggttgggagggagagacgagccttatatataatgcttgtttgtgtttgtgcaagtggacgccgaaacgggcaggagccaaactaaacaaggcagacaatgcgagcttaattggattgcctgatgggcaggggttagggctcgatcaatgggggtgcgaagtgacaaaattgggaattaggttcgcaagcaaggctgacaagactttggcccaaacatttgtacgcggtggacaacaggagccacccatcgtctgtcacgggctagccggtcgtgcgtcctgtcaggctccacctaggctccatgccactccatacaatcccactagtgtaccgctaggccgcttttagctcccatctaagacccccccaaaacctccactgtacagtgcactgtactgtgtggcgatcaagggcaagggaaaaaaggcgcaaacatgcacgcatggaatgacgtaggtaaggcgttactagactgaaaagtggcacatttcggcgtgccaaagggtcctaggtgcgtttcgcgagctgggcgccaggccaagccgctccaaaacgcctctccgactccctccagcggcctccatatccccatccctctccacagcaatgttgttaagccttgcaaacgaaaaaatagaaaggctaataagcttccaatattgtggtgtacgctgcataacgcaacaatgagcgccaaacaacacacacacacagcacacagcagcattaaccacgatgaacagcatgaattcctttacctgcaggataacttcgtataatgtatgctatacgaagttatgatctctctcttgagcttttccataacaagttcttctgcctccaggaagtccatgggtggtttgatcatggttttggtgtagtggtagtgcagtggtggtattgtgactggggatgtagttgagaataagtcatacacaagtcagctttcttcgagcctcatataagtataagtagttcaacgtattagcactgtacccagcatctccgtatcgagaaacacaacaacatgccccattggacagatcatgcggatacacaggttgtgcagtatcatacatactcgatcagacaggtcgtctgaccatcatacaagctgaacaagcgctccatacttgcacgctctctatatacacagttaaattacatatccatagtctaacctctaacagttaatcttctggtaagcctcccagccagccttctggtatcgcttggcctcctcaataggatctcggttctggccgtacagacctcggccgacaattatgatatccgttccggtagacatgacatcctcaacagttcggtactgctgtccgagagcgtctcccttgtcgtcaagacccaccccgggggtcagaataagccagtcctcagagtcgcccttaggtcggttctgggcaatgaagccaaccacaaactcggggtcggatcgggcaagctcaatggtctgcttggagtactcgccagtggccagagagcccttgcaagacagctcggccagcatgagcagacctctggccagcttctcgttgggagaggggactaggaactccttgtactgggagttctcgtagtcagagacgtcctccttcttctgttcagagacagtttcctcggcaccagctcgcaggccagcaatgattccggttccgggtacaccgtgggcgttggtgatatcggaccactcggcgattcggtgacaccggtactggtgcttgacagtgttgccaatatctgcgaactttctgtcctcgaacaggaagaaaccgtgcttaagagcaagttccttgagggggagcacagtgccggcgtaggtgaagtcgtcaatgatgtcgatatgggttttgatcatgcacacataaggtccgaccttatcggcaagctcaatgagctccttggtggtggtaacatccagagaagcacacaggttggttttcttggctgccacgagcttgagcactcgagcggcaaaggcggacttgtggacgttagctcgagcttcgtaggagggcattttggtggtgaagaggagactgaaataaatttagtctgcagaactttttatcggaaccttatctggggcagtgaagtatatgttatggtaatagttacgagttagttgaacttatagatagactggactatacggctatcggtccaaattagaaagaacgtcaatggctctctgggcgtcgcctttgccgacaaaaatgtgatcatgatgaaagccagcaatgacgttgcagctgatattgttgtcggccaaccgcgccgaaaacgcagctgtcagacccacagcctccaacgaagaatgtatcgtcaaagtgatccaagcacactcatagttggagtcgtactccaaaggcggcaatgacgagtcagacagatactcgtcgacgcgataacttcgtataatgtatgctatacgaagttatcgtacgatagttagtagacaacaatcgatcgaggaagaggacaagcggctgcttcttaagtttgtgacatcagtatccaaggcaccattgcaaggattcaaggctttgaacccgtcatttgccattcgtaacgctggtagacaggttgatcggttccctacggcctccacctgtgtcaatcttctcaagctgcctgactatcaggacattgatcaacttcggaagaaacttttgtatgccattcgatcacatgctggtttcgatttgtcttagaggaacgcatatacagtaatcatagagaataaacgatattcatttattaaagtagatagttgaggtagaagttgtaaagagtgataaatagcggccgctcactgaatctttttggctcccttgtgctttcggacgatgtaggtctgcacgtagaagttgaggaacagacacaggacagtaccaacgtagaagtagttgaaaaaccagccaaacattctcattccatcttgtcggtagcagggaatgttccggtacttccagacgatgtagaagccaacgttgaactgaatgatctgcatagaagtaatcagggacttgggcatagggaacttgagcttgatcagtcgggtccaatagtagccgtacatgatccagtgaatgaagccgttgagcagcacaaagatccaaacggcttcgtttcggtagttgtagaacagccacatgtccataggagctccgagatggtgaaagaactgcaaccaggtcagaggcttgcccatgaggggcagatagaaggagtcaatgtactcgaggaacttgctgaggtagaacagctgagtggtgattcggaagacattgttgtcgaaagccttctcgcagttgtcggacatgacaccaatggtgtacatggcgtaggccatagagaggaaggagcccagcgagtagatggacatgagcaggttgtagttggtgaacacaaacttcattcgagactgacccttgggtccgagaggaccaagggtgaacttcaggatgacgaaggcgatggagaggtacagcacctcgcagtgcgaggcatcagaccagagctgagcatagtcgaccttgggaagaacctcctggccaatggagacgatttcgttcacgacctccatggttgtgaattagggtggtgagaatggttggttgtagggaagaatcaaaggccggtctcgggatccgtgggtatatatatatatatatatatatacgatccttcgttacctccctgttctcaaaactgtggtttttcgtttttcgttttttgctttttttgatttttttagggccaactaagcttccagatttcgctaatcacctttgtactaattacaagaaaggaagaagctgattagagttgggctttttatgcaactgtgctactccttatctctgatatgaaagtgtagacccaatcacatcatgtcatttagagttggtaatactgggaggatagataaggcacgaaaacgagccatagcagacatgctgggtgtagccaagcagaagaaagtagatgggagccaattgacgagcgagggagctacgccaatccgacatacgacacgctgagatcgtcttggccggggggtacctacagatgtccaagggtaagtgcttgactgtaattgtatgtctgaggacaaatatgtagtcagccgtataaagtcataccaggcaccagtgccatcatcgaaccactaactctctatgatacatgcctccggtattattgtaccatgcgtcgctttgttacatacgtatcttgcctttttctctcagaaactccagactttggctattggtcgagataagcccggaccatagtgagtctttcacactctgtttaaacaccactaaaaccccacaaaatatatcttaccgaatatacagatctactatagaggaacaattgccccggagaagacggccaggccgcctagatgacaaattcaacaactcacagctgactttctgccattgccactaggggggggcctttttatatggccaagccaagctctccacgtcggttgggctgcacccaacaataaatgggtagggttgcaccaacaaagggatgggatggggggtagaagatacgaggataacggggctcaatggcacaaataagaacgaatactgccattaagactcgtgatccagcgactgacaccattgcatcatctaagggcctcaaaactacctcggaactgctgcgctgatctggacaccacagaggttccgagcactttaggttgcaccaaatgtcccaccaggtgcaggcagaaaacgctggaacagcgtgtacagtttgtcttaacaaaaagtgagggcgctgaggtcgagcagggtggtgtgacttgttatagcctttagagctgcgaaagcgcgtatggatttggctcatcaggccagattgagggtctgtggacacatgtcatgttagtgtacttcaatcgccccctggatatagccccgacaataggccgtggcctcatttttttgccttccgcacatttccattgctcggtacccacaccttgcttctcctgcacttgccaaccttaatactggtttacattgaccaacatcttacaagcggggggcttgtctagggtatatataaacagtggctctcccaatcggttgccagtctcttttttcctttctttccccacagattcgaaatctaaactacacatcacacaatgcctgttactgacgtccttaagcgaaagtccggtgtcatcgtcggcgacgatgtccgagccgtgagtatccacgacaagatcagtgtcgagacgacgcgttttgtgtaatgacacaatccgaaagtcgctagcaacacacactctctacacaaactaacccagctctccatggtgaaggcttctcgacaggctctgcccctcgtcatcgacggaaaggtgtacgacgtctccgcttgggtgaacttccaccctggtggagctgaaatcattgagaactaccagggacgagatgctactgacgccttcatggttatgcactctcaggaagccttcgacaagctcaagcgaatgcccaagatcaaccaggcttccgagctgcctccccaggctgccgtcaacgaagctcaggaggatttccgaaagctccgagaagagctgatcgccactggcatgtttgacgcctctcccctctggtactcgtacaagatcttgaccaccctgggtcttggcgtgcttgccttcttcatgctggtccagtaccacctgtacttcattggtgctctcgtgctcggtatgcactaccagcaaatgggatggctgtctcatgacatctgccaccaccagaccttcaagaaccgaaactggaataacgtcctgggtctggtctttggcaacggactccagggcttctccgtgacctggtggaaggacagacacaacgcccatcattctgctaccaacgttcagggtcacgatcccgacattgataacctgcctctgctcgcctggtccgaggacgatgtcactcgagcttctcccatctcccgaaagctcattcagttccaacagtactatttcctggtcatctgtattctcctgcgattcatctggtgtttccagtctgtgctgaccgttcgatccctcaaggaccgagacaaccagttctaccgatctcagtacaagaaagaggccattggactcgctctgcactggactctcaagaccctgttccacctcttctttatgccctccatcctgacctcgatgctggtgttctttgtttccgagctcgtcggtggcttcggaattgccatcgtggtcttcatgaaccactaccctctggagaagatcggtgattccgtctgggacggacatggcttctctgtgggtcagatccatgagaccatgaacattcgacgaggcatcattactgactggttctttggaggcctgaactaccagatcgagcaccatctctggcccaccctgcctcgacacaacctcactgccgtttcctaccaggtggaacagctgtgccagaagcacaacctcccctaccgaaaccctctgccccatgaaggtctcgtcatcctgctccgatacctgtcccagttcgctcgaatggccgagaagcagcccggtgccaaggctcagtaagcggccgcatgagaagataaatatataaatacattgagatattaaatgcgctagattagagagcctcatactgctcggagagaagccaagacgagtactcaaaggggattacaccatccatatccacagacacaagctggggaaaggttctatatacactttccggaataccgtagtttccgatgttatcaatgggggcagccaggatttcaggcacttcggtgtctcggggtgaaatggcgttcttggcctccatcaagtcgtaccatgtcttcatttgcctgtcaaagtaaaacagaagcagatgaagaatgaacttgaagtgaaggaattt

SEQ ID NO: 113 - DNA, 1185 bp, Yarrowia lipolytica
  CDS (1)..(1185): diacylglycerol cholinephosphotransferase (YlCPT1)
  ref <302>: TITLE: HIGH EICOSAPENTAENOIC ACID PRODUCING STRAINS OF
  ref <310>: PATENT DOCUMENT NUMBER: WO 2006/052870
  ref <311>: PATENT FILING DATE: 2005-11-03
  ref <312>: PUBLICATION DATE: 2006-05-18
  ref <313>: RELEVANT RESIDUES IN SEQ ID NO: (1)..(1185)
  ref <302>: TITLE: HIGH EICOSAPENTAENOIC ACID PRODUCING STRAINS OF
  ref <310>: PATENT DOCUMENT NUMBER: US 2006-0115881-A1
  ref <311>: PATENT FILING DATE: 2005-11-02
  ref <312>: PUBLICATION DATE: 2006-06-01
  ref <313>: RELEVANT RESIDUES IN SEQ ID NO: (1)..(1185)
atgggcgtattcattaaacaggagcagcttccggctctcaagaagtacaagtactccgccgaggatcactcgttcatctccaacaacattctgcgccccttctggcgacagtttgtcaaaatcttccctctgtggatggcccccaacatggtgactctgttgggcttcttctttgtcattgtgaacttcatcaccatgctcattgttgatcccacccacgaccgcgagcctcccagatgggtctacctcacctacgctctgggtctgttcctttaccagacatttgatgcctgtgacggatcccatgcccgacgaactggccagagtggaccccttggagagctgtttgaccactgtgtcgacgccatgaatacctctctgattctcacggtggtggtgtccaccacccatatgggatataacatgaagctgctgattgtgcagattgccgctctcggaaacttctacctgtcgacctgggagacctaccataccggaactctgtacctttctggcttctctggtcctgttgaaggtatcttgattctggtggctcttttcgtcctcaccttcttcactggtcccaacgtgtacgctctgaccgtctacgaggctcttcccgaatccatcacttcgctgctgcctgccagcttcctggacgtcaccatcacccagatctacattggattcggagtgctgggcatggtgttcaacatctacggcgcctgcggaaacgtgatcaagtactacaacaacaagggcaagagcgctctccccgccattctcggaatcgccccctttggcatcttctacgtcggcgtctttgcctgggcccatgttgctcctctgcttctctccaagtacgccatcgtctatctgtttgccattggggctgcctttgccatgcaagtcggccagatgattcttgcccatctcgtgcttgctcccttcccccactggaacgtgctgctcttcttcccctttgtgggactggcagtgcactacattgcacccgtgtttggctgggacgccgatatcgtgtcggttaacactctcttcacctgttttggcgccaccctctccatttacgccttctttgtgcttgagatcatcgacgagatcaccaactacctcgatatctggtgtctgcgaatcaagtaccctcaggagaagaagactgagtaa

SEQ ID NO: 114 - protein, 394 aa, Yarrowia lipolytica
MGVFIKQEQLPALKKYKYSAEDHSFISNNILRPFWRQFVKIFPLWMAPNMVTLLGFFFVIVNFITMLIVDPTHDREPPRWVYLTYALGLFLYQTFDACDGSHARRTGQSGPLGELFDHCVDAMNTSLILTVVVSTTHMGYNMKLLIVQIAALGNFYLSTWETYHTGTLYLSGFSGPVEGILILVALFVLTFFTGPNVYALTVYEALPESITSLLPASFLDVTITQIYIGFGVLGMVFNIYGACGNVIKYYNNKGKSALPAILGIAPFGIFYVGVFAWAHVAPLLLSKYAIVYLFAIGAAFAMQVGQMILAHLVLAPFPHWNVLLFFPFVGLAVHYIAPVFGWDADIVSVNTLFTCFGATLSIYAFFVLEIIDEITNYLDIWCLRIKYPQEKKTE

SEQ ID NO: 115 - DNA, 15812 bp, Artificial Sequence
  Plasmid pZKL2-5U89GC
gtacgttatcatttgaacagtgaaaggctacagtaacagaagcagttgtaaacttcattccgttgattctgtactacagtaccccactacgccgcttccgctgacactgttcaacccaaaaactacatctgcgtgcgctgtgtaaggctatcatcagatacatactgtagattctgtagatgcgaacctgcttgtatcatatacatccccctccccctgacctgcacaagcaagcaatgtgacattgatattgctgcttatctagtgccgaggatgtgaaagccgagactcaaacatttcttttactctcttgttcctgaccagacctggcggagattacgccagtatgattcttgcaggtctgagacaagcctggaacagccaacatttatttttcgaagcgagaaacatgccacaccccggcacgttcagagatgcatatgatttgtttttcgagtaacagtacccccccccccccccccaatgaaaccagtattactcacaccatcctcattcaaagcgttacactgattacgcgcccatcaacgacagcatgaggggactgctgatctgatctaatcaaatgactacaaaaatcgcaataatgaagagcaaacgacaaaaaagaaacaggttaaccaatcccgcttcaatgtctcaccacaatccagcactgtttctcattacctcctccctctaatttcagagttgcatcagggtccttgatggcgcgccagctgcattaatgaatcggccaacgcgcggggagaggcggtttgcgtattgggcgctcttccgcttcctcgctcactgactcgctgcgctcggtcgttcggctgcggcgagcggtatcagctcactcaaaggcggtaatacggttatccacagaatcaggggataacgcaggaaagaacatgtgagcaaaaggccagcaaaaggccaggaaccgtaaaaaggccgcgttgctggcgtttttccataggctccgcccccctgacgagcatcacaaaaatcgacgctcaagtcagaggtggcgaaacccgacaggactataaagataccaggcgtttccccctggaagctccctcgtgcgctctcctgttccgaccctgccgcttaccggatacctgtccgcctttctcccttcgggaagcgtggcgctttctcatagctcacgctgtaggtatctcagttcggtgtaggtcgttcgctccaagctgggctgtgtgcacgaaccccccgttcagcccgaccgctgcgccttatccggtaactatcgtcttgagtccaacccggtaagacacgacttatcgccactggcagcagccactggtaacaggattagcagagcgaggtatgtaggcggtgctacagagttcttgaagtggtggcctaactacggctacactagaagaacagtatttggtatctgcgctctgctgaagccagttaccttcggaaaaagagttggtagctcttgatccggcaaacaaaccaccgctggtagcggtggtttttttgtttgcaagcagcagattacgcgcagaaaaaaaggatctcaagaagatcctttgatcttttctacggggtctgacgctcagtggaacgaaaactcacgttaagggattttggtcatgagattatcaaaaaggatcttcacctagatccttttaaattaaaaatgaagttttaaatcaatctaaagtatatatgagtaaacttggtctgacagttaccaatgcttaatcagtgaggcacctatctcagcgatctgtctatttcgttcatccatagttgcctgactccccgtcgtgtagataactacgatacgggagggcttaccatctggccccagtgctgcaatgataccgcgagacccacgctcaccggctccagatttatcagcaataaaccagccagccggaagggccgagcgcagaagtggtcctgcaactttatccgcctccatccagtctattaattgttgccgggaagctagagtaagtagttcgccagttaatagtttgcgcaacgttgttgccattgctacaggcatcgtggtgtcacgctcgtcgtttggtatggcttcattcagctccggttcccaacgatcaaggcgagttacatgatcccccatgttgtgcaaaaaagcggttagctccttcggtcctccgatcgttgtcagaagtaagttggccgcagtgttatcactcatggttatggcagcactgcataattctcttactgtcatgccatccgtaagatgcttttctgtgactggtgagtactcaaccaagtcattctgagaatagtgtatgcggcgaccgagttgctcttgcccggcgtcaatacgggataataccgcgccacatagcagaactttaaaagtgctcatcattggaaaacgttcttcggggcgaaaactctcaaggatcttaccgctgttgagatccagttcgatgtaacccactcgtgcacccaactgatcttcagcatcttttactttcaccagcgtttctgggtgagcaaaaacaggaaggcaaaatgccgcaaaaaagggaataagggcgacacggaaatgttgaatactcatactcttcctttttcaatattattgaagcatttatcagggttattgtctcatgagcggatacatatttgaatgtatttagaaaaataaacaaataggggttccgcgcacatttccccgaaaagtgccacctgatgcggtgtgaaataccgcacagatgcgtaaggagaaaataccgcatcaggaaattgtaagcgttaatattttgttaaaattcgcgttaaatttttgttaaatcagctcattttttaaccaataggccgaaatcggcaaaatcccttataaatcaaaagaatagaccgagatagggttgagtgttgttccagtttggaacaagagtccactattaaagaacgtggactccaacgtcaaagggcgaaaaaccgtctatcagggcgatggcccactacgtgaaccatcaccctaatcaagttttttggggtcgaggtgccgtaaagcactaaatcggaaccctaaagggagcccccgatttagagcttgacggggaaagccggcgaacgtggcgagaaaggaagggaagaaagcgaaaggagcgggcgctagggcgctggcaagtgtagcggtcacgctgcgcgtaaccaccacacccgccgcgcttaatgcgccgctacagggcgcgtccattcgccattcaggctgcgcaactgttgggaagggcgatcggtgcgggcctcttcgctattacgccagctggcgaaagggggatgtgctgcaaggcgattaagttgggtaacgccagggttttcccagtcacgacgttgtaaaacgacggccagtgaattgtaatacgactcactatagggcgaattgggcccgacgtcgcatgctggtttcgatttgtcttagaggaacgcatatacagtaatcatagagaataaacgatattcatttattaaagtagatagttgaggtagaagttgtaaagagtgataaatagcttagataccacagacaccctcggtgacgaagtactgcagatggtttccaatcacattgacctgctggagcagagtgttaccggcagagcactgtttattgctctggccctggcacatgacaacgttggagagaggagggtggatcaggggccagtcaataaagacctcaccagagcagtgctggtaaccgtcccagaagggcacttgagggacgatatctcctcggtgggtgattcggtagagctttcggtctttggacaccttggagacatcggggttctcctggccaaagaagagtttatcgacccagttagcaaagccagcgttaccgacaatgggctgaccaagagtaacaacgaggggatcgtggccgttaaccttgaggttgattccgaacagaagggctgcagctcctccgagagagtgaccggtgacagcaatctggtagtcgggatactgctcaatcacagagtcgagcttggggccgatctgattgtaggtgttgttgtaggactggatgaagccattgtggacaagacagtcatcacaagtagcagtagaagagatgttagcagcaagatcaaagttaattaactcacctgcaggattgagactatgaatggattcccgtgcccgtattactctactaatttgatcttggaacgcgaaaatacgtttctaggactccaaagaatctcaactcttgtccttactaaatatactacccatagttgatggtttacttgaacagagaggacatgttcacttgacccaaagtttctcgcatctcttggatatttgaacaacggcgtccactgaccgtcagttatccagtcacaaaacccccacattcatacattcccatgtacgtttacaaagttctcaattccatcgtgcaaatcaaaatcacatctattcattcatcatatataaacccatcatgtctactaacactcacaactccatagaaaacatcgactcagaacacacgctccatgcggccgcttaggaatcctgagcgtccttgacacagtgaaccacaccgactttgtgcatgtacttgagggtggaaatgatgttgcccacaatggtagggtagaagacgtaccgaactccgtgtcgttcgcaacactctcggacagcttgctgcacgaagggatagtgccaagacgacattcgaggaaagaggtgatgctcgatctggaagttgagaccgccagtaaagaacatggcaatgggtccaccgtaggtggaagaggtctccacctgagctctgtaccagtcgatctgatcggcttcaacgtccttctcggagctcttgaccttgcagttcttgtcggggattcgctccgagccatcgaagttgtgagacaagatgaaaaagaaggtgaggaaggcaccggtagcagtgggcaccagaggaatggtgatgagcagggaggttccagtgagataccagggcaagaaggcggttcgaaagatgaagaaagctcgcataacgaatgcaagggttcggtaccgtcgcagaaagccgttctctcgcatggctgtgacagactcgggaatggtgtcgttgtgctgcattcggaagatgtagagagggttgtacaccagcgaaacgccgtaggctccaagcacgaggtacatgtaccaggcctggaatcggtgaaaccactttcgagcagtgttggcagcagggtagttgtggaacacaaggaatggttctgcggactcggcatccaggtcgagaccatgctgattggtgtaggtgtgatgtcgcatgatgtgagactgcagccagatccatctggacgatccaatgacgtcgatgccgtaggcaaagagagcgttgacccagggctttttgctgatggcaccatgagaggcatcgtgctgaatggacaggccgatctgcatgtgcatgaatccagtcaagagaccccacagcaccattccggtagtagcccagtgccactcgcaaaaggcggtgacagcaatgatgccaacggttcgcagccagaatccaggtgtggcataccagttccgacctttcatgacctctcgcatagttcgcttgacgtcctgtgcaaagggagagtcgtaggtgtagacaatgtccttggaggttcggtcgtgcttgcctcgcacgaactgttgaagcagcttcgagttctcgggcttgacgtaagggtgcatggagtagaacagaggagaagcatcggaggcaccagaagcgaggatcaagtcgcctccgggatggaccttggcaagaccttccagatcgtagagaatgccgtcgatggcaaccaggtcgggtcgctcgagcagctgctcggtagtaagggagagagccatggttgtgaattagggtggtgagaatggttggttgtagggaagaatcaaaggccggtctcgggatccgtgggtatatatatatatatatatatatacgatccttcgttacctccctgttctcaaaactgtggtttttcgtttttcgttttttgctttttttgatttttttagggccaactaagcttccagatttcgctaatcacctttgtactaattacaagaaaggaagaagctgattagagttgggctttttatgcaactgtgctactccttatctctgatatgaaagtgtagacccaatcacatcatgtcatttagagttggtaatactgggaggatagataaggcacgaaaacgagccatagcagacatgctgggtgtagccaagcagaagaaagtagatgggagccaattgacgagcgagggagctacgccaatccgacatacgacacgctgagatcgtcttggccggggggtacctacagatgtccaagggtaagtgcttgactgtaattgtatgtctgaggacaaatatgtagtcagccgtataaagtcataccaggcaccagtgccatcatcgaaccactaactctctatgatacatgcctccggtattattgtaccatgcgtcgctttgttacatacgtatcttgcctttttctctcagaaactccagaattctctctcttgagcttttccataacaagttcttctgcctccaggaagtccatgggtggtttgatcatggttttggtgtagtggtagtgcagtggtggtattgtgactggggatgtagttgagaataagtcatacacaagtcagctttcttcgagcctcatataagtataagtagttcaacgtattagcactgtacccagcatctccgtatcgagaaacacaacaacatgccccattggacagatcatgcggatacacaggttgtgcagtatcatacatactcgatcagacaggtcgtctgaccatcatacaagctgaacaagcgctccatacttgcacgctctctatatacacagttaaattacatatccatagtctaacctctaacagttaatcttctggtaagcctcccagccagccttctggtatcgcttggcctcctcaataggatctcggttctggccgtacagacctcggccgacaattatgatatccgttccggtagacatgacatcctcaacagttcggtactgctgtccgagagcgtctcccttgtcgtcaagacccaccccgggggtcagaataagccagtcctcagagtcgcccttaggtcggttctgggcaatgaagccaaccacaaactcggggtcggatcgggcaagctcaatggtctgcttggagtactcgccagtggccagagagcccttgcaagacagctcggccagcatgagcagacctctggccagcttctcgttgggagaggggactaggaactccttgtactgggagttctcgtagtcagagacgtcctccttcttctgttcagagacagtttcctcggcaccagctcgcaggccagcaatgattccggttccgggtacaccgtgggcgttggtgatatcggaccactcggcgattcggtgacaccggtactggtgcttgacagtgttgccaatatctgcgaactttctgtcctcgaacaggaagaaaccgtgcttaagagcaagttccttgagggggagcacagtgccggcgtaggtgaagtcgtcaatgatgtcgatatgggttttgatcatgcacacataaggtccgaccttatcggcaagctcaatgagctccttggtggtggtaacatccagagaagcacacaggttggttttcttggctgccacgagcttgagcactcgagcggcaaaggcggacttgtggacgttagctcgagcttcgtaggagggcattttggtggtgaagaggagactgaaataaatttagtctgcagaactttttatcggaaccttatctggggcagtgaagtatatgttatggtaatagttacgagttagttgaacttatagatagactggactatacggctatcggtccaaattagaaagaacgtcaatggctctctgggcgtcgcctttgccgacaaaaatgtgatcatgatgaaagccagcaatgacgttgcagctgatattgttgtcggccaaccgcgccgaaaacgcagctgtcagacccacagcctccaacgaagaatgtatcgtcaaagtgatccaagcacactcatagttggagtcgtactccaaaggcggcaatgacgagtcagacagatactcgtcgaccttttccttgggaaccaccaccgtcagcccttctgactcacgtattgtagccaccgacacaggcaacagtccgtggatagcagaatatgtcttgtcggtccatttctcaccaactttaggcgtcaagtgaatgttgcagaagaagtatgtgccttcattgagaatcggtgttgctgatttcaataaagtcttgagatcagtttggccagtcatgttgtggggggtaattggattgagttatcgcctacagtctgtacaggtatactcgctgcccactttatactttttgattccgctgcacttgaagcaatgtcgtttaccaaaagtgagaatgctccacagaacacaccccagggtatggttgagcaaaaaataaacactccgatacggggaatcgaaccccggtctccacggttctcaagaagtattcttgatgagagcgtatcgatcgaggaagaggacaagcggctgcttcttaagtttgtgacatcagtatccaaggcaccattgcaaggattcaaggctttgaacccgtcatttgccattcgtaacgctggtagacaggttgatcggttccctacggcctccacctgtgtcaatcttctcaagctgcctgactatcaggacattgatcaacttcggaagaaacttttgtatgccattcgatcacatgctggtttcgatttgtcttagaggaacgcatatacagtaatcatagagaataaacgatattcatttattaaagtagatagttgaggtagaagttgtaaagagtgataaatagcggccgctcactgaatctttttggctcccttgtgctttcggacgatgtaggtctgcacgtagaagttgaggaacagacacaggacagtaccaacgtagaagtagttgaaaaaccagccaaacattctcattccatcttgtcggtagcagggaatgttccggtacttccagacgatgtagaagccaacgttgaactgaatgatctgcatagaagtaatcagggacttgggcatagggaacttgagcttgatcagtcgggtccaatagtagccgtacatgatccagtgaatgaagccgttgagcagcacaaagatccaaacggcttcgtttcggtagttgtagaacagccacatgtccataggagctccgagatggtgaaagaactgcaaccaggtcagaggcttgcccatgaggggcagatagaaggagtcaatgtactcgaggaacttgctgaggtagaacagctgagtggtgattcggaagacattgttgtcgaaagccttctcgcagttgtcggacatgacaccaatggtgtacatggcgtaggccatagagaggaaggagcccagcgagtagatggacatgagcaggttgtagttggtgaacacaaacttcattcgagactgacccttgggtccgagaggaccaagggtgaacttcaggatgacgaaggcgatggagaggtacagcacctcgcagtgcgaggcatcagaccagagctgagcatagtcgaccttgggaagaacctcctggccaatggagacgatttcgttcacgacctccatggttgatgtgtgtttaattcaagaatgaatatagagaagagaagaagaaaaaagattcaattgagccggcgatgcagacccttatataaatgttgccttggacagacggagcaagcccgcccaaacctacgttcggtataatatgttaagctttttaacacaaaggtttggcttggggtaacctgatgtggtgcaaaagaccgggcgttggcgagccattgcgcgggcgaatggggccgtgactcgtctcaaattcgagggcgtgcctcaattcgtgcccccgtggctttttcccgccgtttccgccccgtttgcaccactgcagccgcttctttggttcggacaccttgctgcgagctaggtgccttgtgctacttaaaaagtggcctcccaacaccaacatgacatgagtgcgtgggccaagacacgttggcggggtcgcagtcggctcaatggcccggaaaaaacgctgctggagctggttcggacgcagtccgccgcggcgtatggatatccgcaaggttccatagcgccattgccctccgtcggcgtctatcccgcaacctctaaatagagcgggaatataacccaagcttcttttttttcctttaacacgcacacccccaactatcatgttgctgctgctgtttgactctactctgtggaggggtgctcccacccaacccaacctacaggtggatccggcgctgtgattggctgataagtctcctatccggactaattctgaccaatgggacatgcgcgcaggacccaaatgccgcaattacgtaaccccaacgaaatgcctacccctctttggagcccagcggccccaaatccccccaagcagcccggttctaccggcttccatctccaagcacaagcagcccggttctaccggcttccatctccaagcacccctttctccacaccccacaaaaagacccgtgcaggacatcctactgcgtgtttaaacaccactaaaaccccacaaaatatatcttaccgaatatacagatctactatagaggaacaattgccccggagaagacggccaggccgcctagatgacaaattcaacaactcacagctgactttctgccattgccactaggggggggcctttttatatggccaagccaagctctccacgtcggttgggctgcacccaacaataaatgggtagggttgcaccaacaaagggatgggatggggggtagaagatacgaggataacggggctcaatggcacaaataagaacgaatactgccattaagactcgtgatccagcgactgacaccattgcatcatctaagggcctcaaaactacctcggaactgctgcgctgatctggacaccacagaggttccgagcactttaggttgcaccaaatgtcccaccaggtgcaggcagaaaacgctggaacagcgtgtacagtttgtcttaacaaaaagtgagggcgctgaggtcgagcagggtggtgtgacttgttatagcctttagagctgcgaaagcgcgtatggatttggctcatcaggccagattgagggtctgtggacacatgtcatgttagtgtacttcaatcgccccctggatatagccccgacaataggccgtggcctcatttttttgccttccgcacatttccattgctcggtacccacaccttgcttctcctgcacttgccaaccttaatactggtttacattgaccaacatcttacaagcggggggcttgtctagggtatatataaacagtggctctcccaatcggttgccagtctcttttttcctttctttccccacagattcgaaatctaaactacacatcacacaatgcctgttactgacgtccttaagcgaaagtccggtgtcatcgtcggcgacgatgtccgagccgtgagtatccacgacaagatcagtgtcgagacgacgcgttttgtgtaatgacacaatccgaaagtcgctagcaacacacactctctacacaaactaacccagctctccatggtgaaggcttctcgacaggctctgcccctcgtcatcgacggaaaggtgtacgacgtctccgcttgggtgaacttccaccctggtggagctgaaatcattgagaactaccagggacgagatgctactgacgccttcatggttatgcactctcaggaagccttcgacaagctcaagcgaatgcccaagatcaaccaggcttccgagctgcctccccaggctgccgtcaacgaagctcaggaggatttccgaaagctccgagaagagctgatcgccactggcatgtttgacgcctctcccctctggtactcgtacaagatcttgaccaccctgggtcttggcgtgcttgccttcttcatgctggtccagtaccacctgtacttcattggtgctctcgtgctcggtatgcactaccagcaaatgggatggctgtctcatgacatctgccaccaccagaccttcaagaaccgaaactggaataacgtcctgggtctggtctttggcaacggactccagggcttctccgtgacctggtggaaggacagacacaacgcccatcattctgctaccaacgttcagggtcacgatcccgacattgataacctgcctctgctcgcctggtccgaggacgatgtcactcgagcttctcccatctcccgaaagctcattcagttccaacagtactatttcctggtcatctgtattctcctgcgattcatctggtgtttccagtctgtgctgaccgttcgatccctcaaggaccgagacaaccagttctaccgatctcagtacaagaaagaggccattggactcgctctgcactggactctcaagaccctgttccacctcttctttatgccctccatcctgacctcgatgctggtgttctttgtttccgagctcgtcggtggcttcggaattgccatcgtggtcttcatgaaccactaccctctggagaagatcggtgattccgtctgggacggacatggcttctctgtgggtcagatccatgagaccatgaacattcgacgaggcatcattactgactggttctttggaggcctgaactaccagatcgagcaccatctctggcccaccctgcctcgacacaacctcactgccgtttcctaccaggtggaacagctgtgccagaagcacaacctcccctaccgaaaccctctgccccatgaaggtctcgtcatcctgctccgatacctgtcccagttcgctcgaatggccgagaagcagcccggtgccaaggctcagtaagcggccgcatgagaagataaatatataaatacattgagatattaaatgcgctagattagagagcctcatactgctcggagagaagccaagacgagtactcaaaggggattacaccatccatatccacagacacaagctggggaaaggttctatatacactttccggaataccgtagtttccgatgttatcaatgggggcagccaggatttcaggcacttcggtgtctcggggtgaaatggcgttcttggcctccatcaagtcgtaccatgtcttcatttgcctgtcaaagtaaaacagaagcagatgaagaatgaacttgaagtgaaggaatttaaatagttggagcaagggagaaatgtagagtgtgaaagactcactatggtccgggcttatctcgaccaatagccaaagtctggagtttctgagagaaaaaggcaagatacgtatgtaacaaagcgacgcatggtacaataataccggaggcatgtatcatagagagttagtggttcgatgatggcactggtgcctggtatgactttatacggctgactacatatttgtcctcagacatacaattacagtcaagcacttacccttggacatctgtaggtaccccccggccaagacgatctcagcgtgtcgtatgtcggattggcgtagctccctcgctcgtcaattggctcccatctactttcttctgcttggctacacccagcatgtctgctatggctcgttttcgtgccttatctatcctcccagtattaccaactctaaatgacatgatgtgattgggtctacactttcatatcagagataaggagtagcacagttgcataaaaagcccaactctaatcagcttcttcctttcttgtaattagtacaaaggtgattagcgaaatctggaagcttagttggccctaaaaaaatcaaaaaaagcaaaaaacgaaaaacgaaaaaccacagttttgagaacagggaggtaacgaaggatcgtatatatatatatatatatatatacccacggatcccgagaccggcctttgattcttccctacaaccaaccattctcaccaccctaattcacaaccatgggcgtattcattaaacaggagcagcttccggctctcaagaagtacaagtactccgccgaggatcactcgttcatctccaacaacattctgcgccccttctggcgacagtttgtcaaaatcttccctctgtggatggcccccaacatggtgactctgctgggcttcttctttgtcattgtgaacttcatcaccatgctcattgttgatcccacccacgaccgcgagcctcccagatgggtctacctcacctacgctctgggtctgttcctttaccagacatttgatgcctgtgacggatcccatgcccgacgaactggccagagtggaccccttggagagctgtttgaccactgtgtcgacgccatgaatacctctctgattctcacggtggtggtgtccaccacccatatgggatataacatgaagctactgattgtgcagattgccgctctcggaaacttctacctgtcgacctgggagacctaccataccggaactctgtacctttctggcttctctggtcctgttgaaggtatcttgattctggtggctcttttcgtcctcaccttcttcactggtcccaacgtgtacgctctgaccgtctacgaggctcttcccgagtccatcacttcgctgctgcctgccagcttcctggacgtcaccatcacccagatctacattggattcggagtgctgggcatggtgttcaacatctacggcgcctgcggaaacgtgatcaagtactacaacaacaagggcaagagcgctctccccgccattctcggaatcgccccctttggcatcttctacgtcggcgtctttgcctgggcccatgttgctcctctgcttctctccaagtacgccatcgtctatctgtttgccattggggctgcctttgccatgcaagtcggccagatgattcttgcccatctcgtgcttgctccctttccccactggaacgtgctgctcttcttcccctttgtgggactggcagtgcactacattgcacccgtgtttggctgggacgccgatatcgtgtcggttaacactctcttcacctgttttggcgccaccctctccatttacgccttctttgtgcttgagatcatcgacgagatcaccaactacctcgatatctggtgtctgcgaatcaagtaccctcaggagaagaagaccgaataagcggccgcatggagcgtgtgttctgagtcgatgttttctatggagttgtgagtgttagtagacatgatgggtttatatatgatgaatgaatagatgtgattttgatttgcacgatggaattgagaactttgtaaacgtacatgggaatgtatgaatgtgggggttttgtgactggataactgacggtcagtggacgccgttgttcaaatatccaagagatgcgagaaactttgggtcaagtgaacatgtcctctctgttcaagtaaaccatcaactatgggtagtatatttagtaaggacaagagttgagattctttggagtcctagaaacgtattttcgcgttccaagatcaaattagtagagtaatacgggcacgggaatccattcatagtctcaatcctgcaggtgagttaattaatcgagcttggcgtaatcatggtcatagctgtttcctgtgtgaaattgttatccgctcacaattccacacaac

SEQ ID NO: 116 - DNA, 1936 bp, Yarrowia lipolytica
  CDS (283)..(1539)
  ref <302>: TITLE: A  DELTA-12 DESATURASE GENE SUITABLE FOR ALTERING LEVELS OF POLYUNSATURATED FATTY ACIDS IN OLEAGINOUS YEASTS
  ref <310>: PATENT DOCUMENT NUMBER: U.S. 7,214,491
  ref <311>: PATENT FILING DATE: 2004-05-06
  ref <312>: PUBLICATION DATE: 2007-05-08
  ref <313>: RELEVANT RESIDUES IN SEQ ID NO: (1)..(1936)
  ref <302>: TITLE: A  DELTA-12 DESATURASE GENE SUITABLE FOR ALTERING LEVELS OF POLYUNSATURATED FATTY ACIDS IN OLEAGINOUS YEASTS
  ref <310>: PATENT DOCUMENT NUMBER: WO 2004/104167
  ref <311>: PATENT FILING DATE: 2004-05-07
  ref <312>: PUBLICATION DATE: 2004-12-02
  ref <313>: RELEVANT RESIDUES IN SEQ ID NO: (1)..(1936)
cgtagttatatacaagaggtagatgcgtgctggtgttagaggggctctcaggattaggaggaaaatttgacattggccctcaacatataacctcgggtgtgcctctgtttaccctcagcttttgcttgtccccaagtcagtcacgccaggccaaaaaggttggtggattgacagggagaaaaaaaaaagcctagtgggtttaaactcgaggtaagacattgaaatatataccggtcggcatcctgagtccctttctcgtattccaacagaccgaccatagaaatggattcgaccacgcagaccaacaccggcaccggcaaggtggccgtgcagccccccacggccttcattaagcccattgagaaggtgtccgagcccgtctacgacacctttggcaacgagttcactcctccagactactctatcaaggatattctggatgccattccccaggagtgctacaagcggtcctacgttaagtcctactcgtacgtggcccgagactgcttctttatcgccgtttttgcctacatggcctacgcgtacctgcctcttattccctcggcttccggccgagctgtggcctgggccatgtactccattgtccagggtctgtttggcaccggtctgtgggttcttgcccacgagtgtggccactctgctttctccgactctaacaccgtcaacaacgtcaccggatgggttctgcactcctccatgctggtcccttactacgcctggaagctgacccactccatgcaccacaagtccactggtcacctcacccgtgatatggtgtttgtgcccaaggaccgaaaggagtttatggagaaccgaggcgcccatgactggtctgagcttgctgaggacgctcccctcatgaccctctacggcctcatcacccagcaggtgtttggatggcctctgtatctgctgtcttacgttaccggacagaagtaccccaagctcaacaaatgggctgtcaaccacttcaaccccaacgccccgctgtttgagaagaaggactggttcaacatctggatctctaacgtcggtattggtatcaccatgtccgtcatcgcatactccatcaaccgatggggcctggcttccgtcaccctctactacctgatcccctacctgtgggtcaaccactggctcgtggccatcacctacctgcagcacaccgaccccactctgccccactaccacgccgaccagtggaacttcacccgaggagccgccgccaccatcgaccgagagtttggcttcatcggctccttctgcttccatgacatcatcgagacccacgttctgcaccactacgtgtctcgaattcccttctacaacgcccgaatcgccactgagaagatcaagaaggtcatgggcaagcactaccgacacgacgacaccaacttcatcaagtctctttacactgtcgcccgaacctgccagtttgttgaaggtaaggaaggcattcagatgtttagaaacgtcaatggagtcggagttgctcctgacggcctgccttctaaaaagtagagctagaaatgttatttgattgtgttttaactgaacagcaccgagcccgaggctaagccaagcgaagccgaggggttgtgtagtccatggacgtaacgagtaggcgatatcaccgcactcggcactgcgtgtctgcgttcatgggcgaagtcacattacgctgacaaccgttgtagtttccctttagtatcaatactgttacaagtaccggtctcgtactcgtactgatacgaatctgtgggaagaagtcacccttatcagaccttcatactgatgtttcggatatcaatagaactggcatagagccgttaaagaagtttcacttaatcactccaaccctcctacttgtagattcaagcagatcgataagatggatttgatggtcagtgctagc

SEQ ID NO: 117 - protein, 419 aa, Yarrowia lipolytica
MDSTTQTNTGTGKVAVQPPTAFIKPIEKVSEPVYDTFGNEFTPPDYSIKDILDAIPQECYKRSYVKSYSYVARDCFFIAVFAYMAYAYLPLIPSASGRAVAWAMYSIVQGLFGTGLWVLAHECGHSAFSDSNTVNNVTGWVLHSSMLVPYYAWKLTHSMHHKSTGHLTRDMVFVPKDRKEFMENRGAHDWSELAEDAPLMTLYGLITQQVFGWPLYLLSYVTGQKYPKLNKWAVNHFNPNAPLFEKKDWFNIWISNVGIGITMSVIAYSINRWGLASVTLYYLIPYLWVNHWLVAITYLQHTDPTLPHYHADQWNFTRGAAATIDREFGFIGSFCFHDIIETHVLHHYVSRIPFYNARIATEKIKKVMGKHYRHDDTNFIKSLYTVARTCQFVEGKEGIQMFRNVNGVGVAPDGLPSKK

What is claimed is:

1. A method for the production of CoQ₁₀ in a recombinant oleaginous yeast, comprising:
a) providing an oleaginous yeast, the oleaginous yeast
1.) producing a quinone of the coenzyme Q series selected from the group consisting of: CoQ₆, CoQ₇, CoQ₈ and CoQ₉,
2.) comprising genetic constructs encoding a functional ω-3/ω-6 polyunsaturated fatty acid biosynthetic pathway whereby the transformed yeast cells produce at least one polyunsaturated fatty acid; and
3.) optionally comprising genetic constructs encoding a functional carotenoid biosynthetic pathway whereby the transformed yeast cells produce at least one carotenoid;
b) transforming the oleaginous yeast host cell with at least one copy of a genetic construct encoding decaprenyl diphosphate synthase; and,
c) culturing the transformed yeast cells of step (b) under suitable conditions, whereby the decaprenyl diphosphate synthase is expressed and whereby CoQ₁₀ is produced.

2. The method of claim 1, wherein the oleaginous yeast is a member of the genera selected from the group consisting of Yarrowia, Candida, Rhodotorula, Rhodosporidium, Cryptococcus, Trichosporon and Lipomyces.

3. The method of claim 1, wherein the at least one polyunsaturated fatty acid is an ω-3 polyunsaturated fatty acid selected from the group consisting of α-linolenic acid, stearidonic acid, eicosatrienoic acid, eicosatetraenoic acid, eicosapentaenoic acid, docosapentaenoic acid and docosahexaenoic acid or an ω-6 polyunsaturated fatty acid selected from the group consisting of linoleic acid, γ-linolenic acid, eicosadienoic acid, dihomo-γ-linolenic acid, arachidonic acid, docosatetraenoic acid and docosapentaenoic acid.

4. The method of claim 1, wherein the ω-3/ω-6 polyunsaturated fatty acid biosynthetic pathway comprises at least one set of genes selected from the group consisting of:
a) at least one genetic construct encoding a Δ6 desaturase, a C_{18/20} elongase and a Δ5 desaturase;
b) at least one genetic construct encoding a Δ9 elongase, a Δ8 desaturase and a Δ5 desaturase;
c) at least one genetic construct encoding a Δ6 desaturase, a C_{18/20} elongase, a Δ5 desaturase and a Δ17 desaturase;
d) at least one genetic construct encoding a Δ9 elongase, a Δ8 desaturase, a Δ5 desaturase and a Δ17 desaturase;
e) at least one genetic construct encoding a Δ15 desaturase, a Δ6 desaturase, a C_{18/20} elongase and a Δ5 desaturase;
f) at least one genetic construct encoding a Δ15 desaturase, a Δ9 elongase, a Δ8 desaturase and a Δ5 desaturase;
g) at least one genetic construct encoding a Δ6 desaturase, a C_{18/20} elongase, a Δ5 desaturase, a Δ17 desaturase and a C_{20/22} elongase;
h) at least one genetic construct encoding a Δ6 desaturase, a C_{18/20} elongase, a Δ5 desaturase, a Δ17 desaturase, a C_{20/22} elongase and a Δ4 desaturase;
i) at least one genetic construct encoding a Δ9 elongase, a Δ8 desaturase, a Δ5 desaturase, a Δ17 desaturase and a C_{20/22} elongase;
j) at least one genetic construct encoding a Δ9 elongase, a Δ8 desaturase, a Δ5 desaturase, a Δ17 desaturase, a C_{20/22} elongase and a Δ4 desaturase;
k) at least one genetic construct encoding a Δ15 desaturase, a Δ6 desaturase, a C_{18/20} elongase, a Δ5 desaturase, a C_{20/22} elongase and a Δ4 desaturase; and,
l) at least one genetic construct encoding a Δ15 desaturase, a Δ9 elongase, a Δ8 desaturase, a Δ5 desaturase, a C_{20/22} elongase and a Δ4 desaturase.

5. The method of claim 1, wherein the carotenoid is a C₄₀ carotenoid selected from the group consisting of: lycopene, β-carotene, zeaxanthin, lutein, canthaxanthin and astaxanthin.

6. The method of claim 1, wherein the carotenoid biosynthetic pathway comprises at least one genetic construct encoding an enzyme selected from the group consisting of phytoene synthase (crtB), phytoene desaturase (crtI), lycopene cyclase (crtY), carotenoid hydroxylase (crtZ) and a carotenoid ketolase (crtW).

7. The method of claim 1, wherein the coenzyme Q₁₀ produced is from about 0.0001% to less than 1% of the total dry cell weight of the recombinant oleaginous yeast.

8. A microbial oil comprising coenzyme Q₁₀ and at least one compound selected from the group consisting of: a ω-6 polyunsaturated fatty acid, a ω-3 polyunsaturated fatty acid and a C₄₀ carotenoid.

9. A recombinant oleaginous yeast comprising at least one copy of a genetic construct encoding decaprenyl diphosphate synthase, genetic constructs encoding a functional ω-3/ω-6 polyunsaturated fatty acid biosynthetic pathway, and optionally genetic constructs encoding functional carotenoid biosynthetic pathway.

10. A food product comprising an effective amount of a microbial oil of claim 8.

11. A food product of claim 10, selected from the group consisting of a food analogue, a meat product, a cereal product, a baked food, a snack food, a dairy product, a medical food, a dietary supplement, an infant formula, a pharmaceutical, a nutriceutical, and an animal feed.
